(19) United States
(12) Patent Application Publication
(10) Pub. No.: US 2004/0009537 A1
(43) Pub. Date: Jan. 15, 2004

(54) Methods of modulating and of identifying agents that modulate intracellular calcium

(76) Inventors: Jack Roos, San Diego, CA (US); Kenneth Stauderman, San Diego, CA (US); Gonul Velicelebi, San Diego, CA (US)

Correspondence Address: HELLER EHRMAN WHITE & MCAULIFFE LLP, 4350 LA JOLLA VILLAGE DRIVE, 7TH FLOOR, SAN DIEGO, CA, 92122-1246, US

(21) Appl. No.: 10/342,844

(22) Filed: Jan. 13, 2003

Related U.S. Application Data
(60) Provisional application No. 60/347,459, filed on Jan. 11, 2002.
(60) Provisional application No. 60/401,171, filed on Aug. 2, 2002.
(60) Provisional application No. 60/405,678, filed on Aug. 20, 2002.

(51) Int. Cl. C12Q 1/68; G01N 33/53; G01N 33/567; C12N 5/06

(52) U.S. Cl. 435/7.2; 435/348; 435/6

(57) ABSTRACT

Methods are provided for identifying agents that modulate intracellular calcium. Also provided are methods of modulating calcium within cells and treating disease by modulating intracellular calcium. Also provided are methods of screening for nucleic acids encoding candidate ion transport proteins and methods of identifying nucleic acids encoding ion transport proteins.

### RELATED APPLICATIONS

[0001] Benefit of priority under §119(e) is claimed to U.S. Provisional Application Serial No. 60/347,459, filed Jan. 11, 2002, entitled “METHODS OF MODULATING AND OF IDENTIFYING AGENTS THAT MODULATE INTRACELLULAR CALCIUM, to Jack Roos, Kenneth Stauderman and Gönül Velicelebi, and to U.S. Provisional Application Serial Nos. 60/401,171 and 60/405,678 filed Aug. 2, 2002, and Aug. 20, 2002, respectively, entitled “Methods of Modulating and of Identifying Agents that Modulate Intracellular Calcium”, each to Jack Roos, Kenneth Stauderman and Gönül Velicelebi. The subject matter of each of the provisional applications is incorporated by reference in its entirety.

### FIELD OF THE INVENTION

[0002] The present invention relates to methods of identifying agents that modulate intracellular calcium. The invention further relates to methods of modulating calcium within cells and treating disease by modulating intracellular calcium. The invention also relates to methods of screening for nucleic acids encoding candidate ion transport proteins and methods of identifying nucleic acids encoding ion transport proteins.

### BACKGROUND OF THE INVENTION

[0003] Calcium plays a vital role in cell function and survival. For example, calcium is a key element in the transduction of signals into and within cells. Cellular responses to growth factors, neurotransmitters, hormones and a variety of other signal molecules are initiated through calcium-dependent processes. Many proteins are activated by binding calcium and in turn affect other proteins in signal cascade mechanisms in cells. The normal basal concentration of free calcium in the cytoplasm of cells is about 50-100 nM whereas the extracellular calcium concentration is typically about 2 mM. Therefore, intracellular calcium levels and fluctuations thereof are tightly regulated by cells.

[0004] Calcium regulation by cells is accomplished through a variety of mechanisms, some of which are associated with particular cell types. For example, excitable cells, such as muscle and nerve cells in which calcium signals are essential to functions including contraction and transmission of nerve impulses, contain voltage-gated calcium channels spanning the cell membrane. These channels respond to depolarization of the potential difference across the membrane and can open to permit an influx of calcium from the extracellular medium and a rapid increase in intracellular calcium concentrations.

[0005] Nonexcitable cells, e.g., blood cells, fibroblasts and epithelial cells, as well as many excitable cells, contain channels that span intracellular membranes and that can open to permit an influx of calcium into the cytoplasm from calcium-storing organelles, such as the endoplasmic reticulum. One such intracellular ion channel is the inositol 1,4,5-trisphosphate (IP₃) receptor located in the membrane of the endoplasmic reticulum. The IP₃ receptor functions as a ligand-gated ion channel that permits passage of calcium upon binding of IP₃ released through hydolysis of membrane phospholipids by activated phospholipase C (PLC). PLC can be activated through agonist binding to a surface membrane G protein-coupled receptor. Activation of the IP₃ receptor results in the release of calcium stored in the endoplasmic reticulum into the cytoplasm. Reduced endoplasmic reticulum calcium concentration resulting from release of calcium therefrom provides a signal for influx of calcium from the extracellular medium into the cell. It appears that this influx of calcium does not rely on voltage-gated plasma membrane channels and does not involve activation of calcium channels by calcium. This calcium influx mechanism has been referred to as capacitative calcium entry (CCE) or store-operated calcium entry. The actual factor that directly activates influx of calcium across the plasma membrane in CCE is unknown, as is the identity of the molecule or molecules that provide for mobilization of calcium across the plasma membrane and into the cell. Because of the vital role that calcium plays in cell function and survival, dysregulation of calcium in cells can have deleterious effects on cell structure and function. Alterations in intracellular calcium homeostasis have been implicated in a variety of diseases.

[0006] There is a need, therefore, to elucidate the factors, structures and mechanisms involved in calcium regulation in cells which may be targets for therapeutic intervention in diseases associated with calcium dysregulation. There is also a need for agents that modulate intracellular calcium and methods of identifying such agents as possible therapeutic compounds for treatment of diseases associated with calcium dysregulation.

### SUMMARY

[0007] Provided are methods of identifying an agent or a candidate agent that modulates intracellular calcium. The agent is one that modulate any aspect of intracellular calcium, including, but not limited to store-operated calcium entry, resting cytosolic calcium levels and/or calcium levels in or movements of ions into or out of an intracellular organelle. In particular, methods of identifying agents that modulate intracellular calcium by contacting one or more test cells or a portion of a cell with a test agent; monitoring the effect(s) of a test compound on store-operated calcium entry; and identifying a test agent as an agent or candidate agent if it has an effect on store-operated calcium entry are provided. The portion of the cell can be a cell membrane, an organelle, such as nucleus or mitochondrion, or nuclear envelope.

[0008] The test cell contains one or more proteins that is (are) at least about 35% homologous to the protein encoded by Drosophila gene CG4536 or CG5842 over at least about 40% of the encoded protein and that provides for store-operated calcium entry. In other embodiments of all methods provided herein a protein that is homologous to the protein encoded by the Drosophila gene is at least about 35% homologous to the protein encoded by Drosophila gene CG4536 or CG5842 over at least about 50%, 51% or 52% of the encoded protein and that provides for store-operated calcium entry with a test agent. In other embodiments, of all methods provided herein a protein that is homologous to the protein encoded by the Drosophila gene is at least about 41% homologous to the protein encoded by Drosophila gene CG4536 or CG5842 over at least about 50%, 51% or 52% of the encoded protein and that provides for store-operated calcium entry with a test agent. In other embodiments, the protein homologous to the protein encoded by the Drosophila gene is selected to be one that does not contain the contiguous sequence of amino acids EWKFAR (SEQ ID 114) and/or EXD(E)CR(K)GXYXXYE (SEQ ID 115), wherein X is any amino acid and an amino acid residue in parentheses is an alternative to the residue immediately preceding it.

[0009] Exemplary proteins in the test cells are a calcium transport protein 1 (CaT protein), an ECaC protein, an epithelial calcium channel, a CaT2 protein, an olfactory channel, a stretch-activated channel protein, a vanilloid receptor-related osmotically activated channel protein, a vanilloid receptor type 1-like protein, a vanilloid receptor subtype 1 protein, a vanilloid receptor 1 protein, a vanilloid receptor-like protein, a capsaicin receptor protein, an olfactory trp C4 (OTRPC4) protein, a growth factor-regulated calcium channel protein, a transient receptor potential protein 12 (trp12), a transient receptor potential protein V3 (TRPV3), a stretch-inhibitable nonselective channel (SIC) protein. The protein that provide for store-operated calcium entry includes proteins that are components, such as subunits of a store-operated calcium channel, and includes proteins that affect, directly or indirectly, the activity, expression or level of such components. Also, the proteins can be from any source, particularly mammalian sources, and include human proteins.

[0010] In certain embodiments of the methods the step of monitoring the effects of a test compound on store-operated calcium entry includes the steps of: comparing store-operated calcium entry into one or more test cell(s) in the presence and absence of the test agent or comparing store-operated calcium entry into a test cell and into a control cell in the presence of the test agent. The step of identifying includes identifying a test agent as an agent or candidate agent that modulates intracellular calcium if store-operated calcium entry into the one or more test cells differs in the presence and absence of the test agent or if store-operated calcium entry into a test cell and the control cell differs. A control cell is generally a substantially similar cell to a test cell, but is a cell that contains a different amount, including none, of the one or more proteins that are homologous to the protein encoded by Drosophila gene CG4536 or CG5842 or the such proteins as described herein. The test cells can be any cell, and are typically eukaryotic cells, particularly mammalian cells, including human cells and cells that serve as human disease models. The cells can be primary cells or a cell line. The test cells and control cells in any experiment are generally from the same source.

[0011] In other embodiments, monitoring the effect(s) of the test agent on store-operated calcium entry is effected by reducing the calcium level in an intracellular calcium store of one or more test cells; and monitoring the effect of test agent on intracellular and/or extracellular a) ion movement, b) ion flux or c) ion levels of the one or more test cells; and the step of identifying includes identifying a test agent as an agent or candidate agent if it has an effect on a), b) or c). The step of reducing the calcium levels in an intracellular calcium store is performed before, simultaneously with or after the step of contacting one or more test cells with the test agent.

[0012] In these methods, the step of monitoring the effect(s) of test agent on store-operated calcium can further include: comparing a), b) or c) in the presence and absence of the test agent or comparing a), b) or c) of a test cell and a control cell in the presence of the test agent; and identifying further includes: identifying a test agent as an agent or candidate agent that modulates intracellular calcium if a), b) or c) of a test cell differ in the presence and absence of the test agent or if a), b) or c) of a test cell and the control cell differ.

[0013] In other embodiments of any of the methods provided herein, the step of monitoring the effects of test agent on store-operated calcium includes: determining intracellular or cytoplasmic calcium levels of one or more test cells; and identifying includes: identifying a test agent as an agent or candidate agent if it has an effect on intracellular or cytoplasmic calcium levels of one or more test cells. In these methods, monitoring the effect(s) of test agent on store-operated calcium can further include: comparing the intracellular calcium levels of one or more test cells in the presence and absence of the test agent or the intracellular calcium levels of a test cell and of a control cell in the presence of the test agent; and identifying is effected by identifying a test agent as an agent or candidate agent that modulates intracellular calcium if the intracellular calcium levels of a test cell differ in the presence and absence of the test agent or if the intracellular calcium levels of a test cell and the control cell differ.

[0014] In all of the methods provided herein the step of monitoring the effects of test agent on store-operated calcium can include: monitoring intracellular calcium levels as a function of time in one or more test cells to assess fluctuations in intracellular calcium levels; and identifying includes identifying a test agent as an agent or as a candidate agent if it has an effect on intracellular calcium level as a function of time (its time course). In these methods monitoring the effect(s) of test agent on store-operated calcium can further include: comparing the intracellular calcium level time courses of a test cell in the presence and absence of the test agent or the intracellular calcium level time courses of a test cell and a control cell in the presence of the test agent; and identifying includes: identifying a test agent as an agent that modulates intracellular calcium if the intracellular calcium level time courses of a test cell differ in the presence and absence of the test agent or if the intracellular calcium level time courses of a test cell and the control cell differ.

[0015] In all of the methods provided herein the step of monitoring the effects of test agent on store-operated calcium can include monitoring the effects of test agent on store-operated calcium by assessing comprises assessing ion flux across the cell plasma membrane of a test cell; and identifying includes identifying a test agent as an agent or candidate if it has an effect on ion flux across the cell plasma membrane of a test cell. In these methods, monitoring the effect(s) of test agent on store-operated calcium can further include comparing the ion flux across the cell plasma membrane of a test cell in the presence and absence of the test agent or the ion flux across plasma membrane of a test cell and a control cell in the presence of the test agent; and identifying can further include identifying a test agent as an agent or candidate agent that modulates intracellular calcium if the ion flux across the cell plasma membrane of a test cell differs in the presence and absence of the test agent or if the ion flux across the plasma membrane of a test cell and the control cell differs.

[0016] Also provided are methods for identifying an agent (or candidate agent) that modulates intracellular calcium by monitoring the effects of an agent on store-operated calcium entry in any test system, including in vivo systems, such as cells and organisms that contain a protein homologous to a Drosophila protein as defined herein, and in vitro systems, such as a protein homologous to a Drosophila protein as defined herein, where the agent modulates the activity of, the interaction of, the level of or binds to a protein that provides for store-operated calcium entry; and identifying a test agent as an agent (candidate agent) that modulates intracellular calcium if it has an effect on store-operated calcium entry in the test system.

[0017] The protein in the test system is one that has a requisite homology to a protein encoded by Drosophila gene CG4536 or CG5842 as described above and in detail below, and includes the proteins set forth above and throughout the disclosure. As noted above, in embodiments of all methods provided herein a protein that is homologous to the protein encoded by the Drosophila gene is at least about 35% homologous to the protein encoded by Drosophila gene CG4536 or CG5842 over at least about 50%, 51% or 52% of the encoded protein and that provides for store-operated calcium entry with a test agent. In other embodiments, of all methods provided herein a protein that is homologous to the protein encoded by the Drosophila gene is at least about 41% homologous to the protein encoded by Drosophila gene CG4536 or CG5842 over at least about 50%, 51% or 52% of the encoded protein and that provides for store-operated calcium entry with a test agent. In other embodiments, the protein homologous to the protein encoded by the Drosophila gene is selected to be one that does not contain the contiguous sequence of amino acids EWKFAR (SEQ ID 114) and/or EXD(E)CR(K)GXYXXYE (SEQ ID 115), wherein X is any amino acid and an amino acid residue in parentheses is an alternative to the residue immediately preceding it.

[0018] Exemplary of these proteins are a calcium transport protein 1 (CaT protein), an ECaC protein, an epithelial calcium channel, a CaT2 protein, an olfactory channel, a stretch-activated channel protein, a vanilloid receptor-related osmotically activated channel protein, a vanilloid receptor type 1-like protein, a vanilloid receptor subtype 1 protein, a vanilloid receptor 1 protein, a vanilloid receptor-like protein, a capsaicin receptor protein, an olfactory trp C4 (OTRPC4) protein, a growth factor-regulated calcium channel protein, a transient receptor potential protein 12 (trp12), a transient receptor potential protein V3 (TRPV3), a stretch-inhibitable nonselective channel (SIC) protein.

[0019] In the methods for identifying an agent (or candidate agent) that modulates intracellular calcium by monitoring the effects of an agent on store-operated calcium entry in any test system, the step of monitoring the effects, includes: comparing store-operated calcium entry into one or more test cell(s) in the presence and absence of the test agent or comparing store-operated calcium entry into a test cell and into a control cell in the presence of the test agent; and the step of identifying is performed by identifying a test agent as an agent that modulates intracellular calcium if store-operated calcium entry into the one or more test cells differs in the presence and absence of the test agent or if store-operated calcium entry into a test cell and the control cell differs. As described above, a control cell is substantially similar cell to a test cell, but contains a different amount, including none, of the one or more proteins that is (are) at least about homologous to the protein encoded by Drosophila gene CG4536 or CG5842 as described above.

[0020] In these methods, the step of monitoring the effect(s) of the test agent on store-operated calcium entry, includes: reducing the calcium level in an intracellular calcium store of one or more test cells; and monitoring the effect of test agent on intracellular and/or extracellular a) ion movement, b) ion flux or c) ion levels of the one or more test cells; and identifying comprises identifying a test agent as an agent if it has an effect on a), b) or c). The step of reducing the calcium levels in an intracellular calcium store is performed before, simultaneously with or after the step of contacting one or more test cells with the test agent.

[0021] In these methods, the step of, monitoring the effect(s) of test agent on store-operated calcium can further include: comparing a), b) or c) in the presence and absence of the test agent or comparing a), b) or c) of a test cell and a control cell in the presence of the test agent; and identifying further includes: identifying a test agent as an agent that modulates intracellular calcium if a), b) or c) of a test cell differ in the presence and absence of the test agent or if a), b) or c) of a test cell and the control cell differ.

[0022] In the methods for identifying an agent (or candidate agent) that modulates intracellular calcium by monitoring the effects of an agent on store-operated calcium entry in any test system, the step of monitoring the effects of a test agent on store-operated calcium includes: determining intracellular or cytoplasmic calcium levels of one or more test cells; and identifying includes: identifying a test agent as an agent if it has an effect on intracellular or cytoplasmic calcium levels of one or more test cells. In these methods, monitoring the effect(s) of test agent on store-operated calcium can further include: comparing the intracellular calcium levels of one or more test cells in the presence and absence of the test agent or the intracellular calcium levels of a test cell and of a control cell in the presence of the test agent; and identifying can include identifying a test agent as an agent that modulates intracellular calcium if the intracellular calcium levels of a test cell differ in the presence and absence of the test agent or if the intracellular calcium levels of a test cell and the control cell differ.

[0023] In these methods, monitoring the effects of test agent on store-operated calcium can include: monitoring intracellular calcium levels as a function of time in one or more test cells for fluctuations in intracellular calcium levels; and

[0024] identifying can include: identifying a test agent as an agent (or candidate agent) if it has an effect on intracellular calcium level time courses. The step of monitoring the effect(s) of test agent on store-operated calcium can further include: comparing the intracellular calcium level time courses of a test cell in the presence and absence of the test agent or the intracellular calcium level time courses of a test cell and a control cell in the presence of the test agent; and identifying can include:

[0025] identifying a test agent as an agent that modulates intracellular calcium if the intracellular calcium level time courses of a test cell differ in the presence and absence of the test agent or if the intracellular calcium level time courses of a test cell and the control cell differ.

[0026] In these methods, monitoring the effects of test agent on store-operated calcium can include assessing comprises assessing ion flux across the cell plasma membrane of a test cell; and identifying can include: identifying a test agent as an agent if it has an effect on ion flux across the cell plasma membrane of a test cell.

[0027] Monitoring the effect(s) of test agent on store-operated calcium can further include: comparing the ion flux across the cell plasma membrane of a test cell in the presence and absence of the test agent or the ion flux across plasma membrane of a test cell and a control cell in the presence of the test agent; and

[0028] identifying can include identifying a test agent as an agent (or candidate agent) that modulates intracellular calcium if the ion flux across the cell plasma membrane of a test cell differs in the presence and absence of the test agent or if the ion flux across the plasma membrane of a test cell and the control cell differs. 30. The method of claim 1 or claim 18, wherein a protein that provides for store-operated calcium entry is a mammalian protein.

[0029] Also provided are methods for modulating store-operated calcium entry. These methods can include first contacting a cell that has altered store-operated calcium entry with an agent that modulates the level of, expression of, activity of or molecular interactions of a protein that is homologous to the protein encoded by Drosophila gene CG4536 or CG5842 as described herein. Such proteins generally also provide for store-operated calcium entry. Such contacting effects modulation of store-operated calcium transport into the cell. These methods for modulating can be performed with using the proteins, test cells, control cells and other components as described above for the methods of identifying agents that modulate intracellular calcium.

[0030] In other embodiments, methods for identifying a molecule that provides for store-operated calcium entry are provided. These methods include the step of identifying a molecule that interacts with (binds to or otherwise affects the activity, level of or expression of) a protein as defined above and herein that is homologous to the protein encoded by Drosophila and also that provides for store-operated calcium entry, thereby identifying molecules involved in modulating store-operated calcium entry. This methods can further include eliminating, altering or reducing the expression of a gene encoding the protein in a cell and evaluating intracellular calcium. In these methods the protein includes those defined above. The cells in which intracellular calcium is evaluated is, include any cell as described above and herein, including mammalian cells.

[0031] The agents identified by the methods provided herein are agents for or candidate agents for treatment of a variety of disorders or diseases, such as neurodegenerative diseases.

### DETAILED DESCRIPTION OF PREFERRED EMBODIMENTS

[0032] Definitions

[0033] Unless defined otherwise, all technical and scientific terms used herein have the same meaning as is commonly understood by one of skill in the art to which this invention belongs. All patents, patent applications, publications and published nucleotide and amino acid sequences (e.g., sequences available in GenBank or other databases) referred to herein are incorporated by reference. Where reference is made to a URL or other such identifier or address, it is understood that such identifier can change and particular information on the internet can come and go, but equivalent information can be found by searching the internet. Reference thereto evidences the availability and public dissemination of such information.

[0034] As used herein, “intracellular calcium” refers to calcium ions located in a cell without specification of a particular cellular location. In contrast, “cytosolic” or “cytoplasmic” with reference to calcium refers to calcium ions located in the cell cytoplasm.

[0035] As used herein, “modulation” with reference to intracellular calcium is any alteration in intracellular calcium, including but not limited to alteration of calcium concentration in the cytoplasm and/or intracellular calcium storage organelles, e.g., endoplasmic reticulum, alteration of the kinetics of calcium fluxes into and within cells. Modulation of the response of a cell to reduction in calcium levels of intracellular calcium stores refers to any alteration in the cell's response, including, but not limited to, alterations in calcium entry into the cell and/or alterations in refilling of intracellular calcium stores.

[0036] As used herein, an effect on store-operated calcium entry is any alteration of any aspect of store-operated calcium entry, including but not limited to, an alteration of the operation of a store-operated calcium channel and the properties, such as, for example, the kinetics, sensitivites, rate, amplitude, and electrophysiological characterisitics, of calcium flux or movement that occurs in store-operated calcium entry. These aspects can be assessed in a variety of ways including, but not limited to, evaluation of calcium or other ion (particularly cation) levels, movement of calcium or other ion (particularly cation), fluctuations in calcium or other ion (particularly cation) levels, kinetics of calcium or other ion (particularly cation) fluxes and/or transport of calcium or other ion (particularly cation) through a membrane. An alteration can be any such change that is statistically significant. Thus, for example if store-operated calcium entry into a test cell and a control cell is said to differ, such difference is a statistically significant difference.

[0037] As used herein, “provides for store operated calcium entry” with respect to a protein means that when expression or activity of the protein in a cell is reduced, altered or eliminated, there is a concomitant or associated reduction, alteration or elimination of store operated calcium entry. Such reduction in expression or activity can occur by virtue of an alteration of expression of a gene encoding the protein or by altering the levels of the protein. A protein that provides for store-operated calcium entry, thus, can be one that participates in store-operated calcium entry or is part of a store-operated calcium entry channel. A protein that participates in store-operated calcium entry can be a protein that is not necessarily a component of the store-operated calcium entry channel but is directly or indirectly associated with its activity, such as, for example, a non pore-forming subunit or ligand or other modulatory or regulatory protein that modulates its activity.

[0038] As used herein, a protein that is a component of a store-operated calcium entry channel is a protein that participates in forming the pore or constitutes the pore of the channel.

[0039] As used herein, stating that levels of something fluctuate over time typically refers to time periods on the order of seconds to minutes after an initiating event, such as store depletion, but can refer to longer or shorter time periods. The exact time frame for monitoring an event is a function of the particular assay and event, and one of skill in the art can determine the time period empirically.

[0040] As used herein, “heterologous” or “foreign” with reference to nucleic acids, cDNA, DNA and RNA are used interchangeably and refer to nucleic acid, DNA or RNA that does not occur naturally as part of the genome in which it is present or which is found in a location(s) or in an amount in the genome that differs from that in which it occurs in nature. It is nucleic acid that has been exogenously introduced into the cell. Thus, heterologous nucleic acid is nucleic acid not normally found in the host genome in an identical context. Examples of heterologous nucleic acids include, but are not limited to, DNA that encodes a gene product or gene product(s) of interest, introduced, for example, for purposes of gene therapy or for production of an encoded protein. Other examples of heterologous DNA include, but are not limited to, DNA that encodes a selectable marker, DNA that encodes therapeutically effective substances, such as anti-cancer agents, enzymes and hormones, and DNA that encodes other types of proteins, such as antibodies.

[0041] As used herein, “expression” refers to the process by which nucleic acid, e.g., DNA, is transcribed into mRNA and translated into peptides, polypeptides, or proteins. If the nucleic acid is derived from genomic DNA, expression may, if an appropriate eukaryotic host cell or organism is selected, include splicing of the mRNA.

[0042] As used herein, “vector” or “plasmid” refers to discrete elements that are used to introduce heterologous nucleic acids into cells. Typically, vectors are used to transfer heterologous nucleic acids into cells for either expression of the heterologous nucleic acid or for replication of the heterologous nucleic acid. Selection and use of such vectors and plasmids are well within the level of skill of the art.

[0043] As used herein, “transformation” or “transfection” refers to the process by which nucleic acids are introduced into cells. Transfection refers to the taking up of exogenous nucleic acid, e.g., an expression vector, by a host cell whether or not any coding sequences are in fact expressed. Numerous methods of transfection are known to the ordinarily skilled artisan. Successful transfection is generally recognized by detection of the presence of the heterologous nucleic acid within the transfected cell, such as, for example, any visualization of the heterologous nucleic acid or any indication of the operation of a vector within the host cell.

[0044] As used herein, “injection” refers to the microinjection (use of a small syringe) of nucleic acid into a cell.

[0045] As used herein, the amino acids, which occur in the various amino acid sequences appearing herein, are identified according to their well-known, three-letter or one-letter abbreviations (see Table 1). The nucleotides, which occur in the various DNA fragments, are designated with the standard single-letter designations used routinely in the art.

[0046] As used herein, amino acid residue refers to an amino acid formed upon chemical digestion (hydrolysis) of a polypeptide at its peptide linkages. The amino acid residues described herein are preferably in the “L” isomeric form. However, residues in the “D” isomeric form can be substituted for any L-amino acid residue, as long as the desired functional property is retained by the polypeptide. NH₂ refers to the free amino group present at the amino terminus of a polypeptide. COOH refers to the free carboxy group present at the carboxyl terminus of a polypeptide. In keeping with standard polypeptide nomenclature described in J. Biol. Chem., 243:3552-59 (1969) and adopted at 37 C.F.R. §§1.821-1.822, abbreviations for amino acid residues are shown in Table 1:

TABLE 1
Table of Correspondence

SYMBOL

| 1-Letter | 3-Letter | AMINO ACID |
|---|---|---|
| Y | Tyr | tyrosine |
| G | Gly | glycine |
| F | Phe | phenylalanine |
| M | Met | methionine |
| A | Ala | alanine |
| S | Ser | serine |
| I | Ile | isoleucine |
| L | Leu | leucine |
| T | Thr | threonine |
| V | Val | valine |
| P | Pro | proline |
| K | Lys | lysine |
| H | His | histidine |
| Q | Gln | glutamine |
| E | Glu | glutamic acid |
| Z | Glx | Glu and/or Gln |
| W | Trp | tryptophan |
| R | Arg | arginine |
| D | Asp | aspartic acid |
| N | Asn | asparagine |
| B | Asx | Asn and/or Asp |
| C | Cys | cysteine |
| X | Xaa | Unknown or other |

[0047] It should be noted that all amino acid residue sequences represented herein by formulae have a left to right orientation in the conventional direction of amino-terminus to carboxyl-terminus. In addition, the phrase “amino acid residue” is broadly defined to include the amino acids listed in the Table of Correspondence and modified and unusual amino acids, such as those referred to in 37 C.F.R. §§1.821-1.822, and incorporated herein by reference. Furthermore, it should be noted that a dash at the beginning or end of an amino acid residue sequence indicates a peptide bond to a further sequence of one or more amino acid residues or to an amino-terminal group such as NH₂ or to a carboxyl-terminal group such as COOH.

[0048] In a peptide or protein, suitable conservative substitutions of amino acids are known to those of skill in this art and may be made generally without altering the biological activity of the resulting molecule. Those of skill in this art recognize that, in general, single amino acid substitutions in non-essential regions of a polypeptide do not substantially alter biological activity (see, e.g., Watson et al. Molecular Biology of the Gene, 4th Edition, 1987, The Benjamin/Cummings Pub. co., p.224).

[0049] Such substitutions may be made in accordance with those set forth in TABLE 2 as follows:

TABLE 2

| Original residue | Conservative substitution |
|---|---|
| Ala (A) | Gly; Ser |
| Arg (R) | Lys |
| Asn (N) | Gln; His |
| Cys (C) | Ser |
| Gln (Q) | Asn |
| Glu (E) | Asp |
| Gly (G) | Ala; Pro |
| His (H) | Asn; Gln |
| Ile (I) | Leu; Val |
| Leu (L) | Ile; Val |
| Lys (K) | Arg; Gln; Glu |
| Met (M) | Leu; Tyr; Ile |
| Phe (F) | Met; Leu; Tyr |
| Ser (S) | Thr |
| Thr (T) | Ser |
| Trp (W) | Tyr |
| Tyr (Y) | Trp; Phe |
| Val (V) | Ile; Leu |

[0050] Other substitutions are also permissible and may be determined empirically or in accord with known conservative substitutions.

[0051] As used herein, “similarity” between two proteins or nucleic acids refers to the relatedness between the amino acid sequences of the proteins or the nucleotide sequences of the nucleic acids. Similarity can be based on the degree of identity and/or homology of sequences and the residues contained therein. Methods for assessing the degree of similarity between proteins or nucleic acids are known to those of skill in the art. For example, in one method of assessing sequence similarity, two amino acid or nucleotide sequences are aligned in a manner that yields a maximal level of identity between the sequences. “Identity” refers to the extent to which the amino acid or nucleotide sequences are invariant. Alignment of amino acid sequences, and to some extent nucleotide sequences, also can take into account conservative differences and/or frequent substitutions in amino acids (or nucleotides). Conservative differences are those that preserve the physico-chemical properties of the residues involved. Alignments can be global (alignment of the compared sequences over the entire length of the sequences and including all residues) or local (the alignment of a portion of the sequences that includes only the most similar region or regions).

[0052] “Identity” per se has an art-recognized meaning and can be calculated using published techniques. (See, e.g.: Computational Molecular Biology, Lesk, A. M., ed., Oxford University Press, New York, 1988; Biocomputing: Informatics and Genome Projects, Smith, D. W., ed., Academic Press, New York, 1993; Computer Analysis of Sequence Data, Part I, Griffin, A. M., and Griffin, H. G., eds., Humana Press, New Jersey, 1994; Sequence Analysis in Molecular Biology, von Heinje, G., Academic Press, 1987; and Sequence Analysis Primer, Gribskov, M. and Devereux, J., eds., M Stockton Press, New York, 1991). While there exist a number of methods to measure identity between two polynucleotide or polypeptide sequences, the term “identity” is well known to skilled artisans (Carillo, H. & Lipton, D., SIAM J Applied Math 48:1073 (1988)).

[0053] As used herein, “homology” with reference to proteins or nucleic acids refers to shared sequence similiarity that takes into account both identical residues and residues that may substitute for one another. Substitutions may include, for example, conserved amino acids and frequent substitutions based on statistical analyses and evolutionary distance.

[0054] Percent identity and homology may be determined, for example, by comparing sequence information using any of a number of computer algorithms known in the art. The GAP program uses the alignment method of Needleman and Wunsch [J. Mol. Biol. 48:443 (1970)], as revised by Smith and Waterman [Adv. Appl. Math. 2:482 (1981)]. Briefly, the GAP program defines similarity as the number of aligned symbols (i.e., nucleotides or amino acids) which are similar, divided by the total number of symbols in the shorter of the two sequences. Default parameters for the GAP program may include: (1) a unary comparison matrix (containing a value of 1 for identities and 0 for non-identities) and the weighted comparison matrix of Gribskov and Burgess, Nucl. Acids Res. 14:6745 (1986), as described by Schwartz and Dayhoff, eds., ATLAS OF PROTEIN SEQUENCE AND STRUCTURE, National Biomedical Research Foundation, pp. 353-358 (1979); (2) a penalty of 3.0 for each gap and an additional 0.10 penalty for each symbol in each gap; and (3) no penalty for end gaps.

[0055] Whether any two protein or nucleic acid molecules have amino acid or nucleotide sequences that are at least, for example, 20%, 30%, 40%, or 50%, “identical” can be determined using known computer algorithms such as the “FAST A” program, using for example, the default parameters as in Pearson and Lipman, Proc. Natl. Acad. Sci. USA 85:2444 (1988). The BLAST function of the National Center for Biotechnology Information database may be used to determine identity. By way of example, in a comparison of a test and reference polypeptide, wherein the length of the reference polypeptide is 100 amino acids, a level of 90% or more identity between the polypeptides is indicative of having no more than 10% (i.e., 10 out of 100) amino acids in the test polypeptide differing from that of the reference polypeptide. Similar comparisons may be made between a test and reference polynucleotides. Such differences may be represented as point mutations randomly distributed over the entire length of an amino acid sequence or they may be clustered in one or more locations of varying length up to the maximum allowable, e.g. 10/100 amino acid difference (approximately 90% identity). The BLinK tool (“BLAST Link”) displays the results of precomputed BLAST searches [Altschul et al. (19990) J. Mol. Biol. 215:403-410] that have been done for protein sequences in the Entrez Proteins data domain against the non-redundant (nr) database.

[0056] Methods commonly employed to determine identity or homology between two sequences include, but are not limited to, those disclosed in Guide to Huge Computers, Martin J. Bishop, ed., Academic Press, San Diego, 1994, and Carillo, H. & Lipton, D., SIAM J Applied Math 48:1073 (1988). Methods to determine identity and homology are codified in computer programs. Computer program methods to determine identity and homology between two sequences include, but are not limited to, GCG program package (Devereux, J., et al., Nucleic Acids Research 12(I):387 (1984)), BLASTP, BLASTN, FASTA (Atschul, S. F., et al., J Molec Biol 215:403 (1990)).

[0057] Therefore, as used herein, the terms “identity” and “homology” represent a comparison between two polypeptides or polynucleotides.

[0058] Typically, a “test” polypeptide or polynucleotide is compared to a “reference” molecule to determine if there is a significant level of similarity (including identity and/or homology) between the test and reference molecules.

[0059] As used herein, the terms at least “X% homology over X% of the protein” or “X% identity over X% of the protein” with reference to a comparison of protein A with protein B refers to protein A having X% homology or X% identity to protein B over X% of the amino acid sequence of protein B. The term “over the protein” means over the length of the amino acid sequence of the protein, but not necessarily over a contigous sequence of amino acids of the protein. Thus, for example, protein B may be 40% homologous to protein A over 60% of protein B; however, the 60% of the amino acids in protein B to which protein A has homology may be located in multiple, separate sequences (e.g., regions or domains) of protein B.

[0060] As used herein, protein “homologs” refers to similar proteins encoded by related but different genes either within a species or between species. Protein “orthologs” refers to similar proteins in different species that arose from a common ancestral gene.

[0061] As used herein, all assays and procedures, such as hybridization reactions and antibody-antigen reactions, unless otherwise specified, are conducted under conditions recognized by those of skill in the art as standard conditions.

[0062] A. Proteins Involved in Modulating Intracellular Calcium

[0063] Fluctuations in the level of calcium, including free and bound calcium, in cells provide important biological signals involved in processes such as protein secretion, muscle contraction, cell death and development. The movement of cations, such as calcium, into, within and out of cells thus plays a critical role in the operation and survival of cells. Calcium binding and movement into, out of and within cells can act as a signal that is highly organized in space, frequency and amplitude due in part to localization of the movements and tight regulation of the processes through which calcium movement occurs in cells. One process through which an increase in cytosolic calcium levels can occur is the release of calcium from stores within cells. Another process involves entry of extracellular calcium into cells by movement across the plasma membrane. One mechanism for movement of calcium into cells through the plasma membrane is commonly referred to as store-operated calcium entry.

[0064] Altered calcium regulation or calcium dyshomeostasis in cells is associated with a number of diseases and disorders. Altered calcium regulation can be the result of alterations in the elements involved in movement of calcium, and/or in the regulation thereof. It is therefore desirable to identify cellular constituents, such as proteins, that modulate intracellular calcium, including, for example, proteins that provide for and/or regulate the movement of cations, such as calcium, into, within and out of cells, and to identify agents that modulate intracellular calcium.

[0065] Identification of molecules, e.g., proteins, involved in modulating intracellular calcium makes possible the elucidation of the molecular and cellular mechanisms underlying modulatory processes such as calcium binding and movement. An example of one such process is store-operated calcium entry, a fundamental and essential process of many cells. The identities of the molecular components that are involved in and/or provide for store-operated calcium entry, and, in particular, the identities of the ion transport proteins or channels that provide for store-operated calcium entry are largely unknown and may differ for different cell types. Identification of such molecules provides molecular targets for the regulation of this specific and critical process in calcium-dependent cellular functions.

[0066] Furthermore, identification of molecules inovlved in modulating intracellular calcium assists in the dissection of complex signaling processes and facilitates the elucidation of the element(s) involved in regulation of these processes. Such processes include, but are not limited to, receptor-mediated, store-operated and second messenger-operated cation entry into the cytoplasm or intracellular organelles. Knowledge of the number and structure of such molecules, as well as a comparison of their properties, permits the identification and design of agents that specifically interact with and/or affect or regulate molecules, such as, for example, ion transport proteins, that modulate intracellular calcium. Such agents have many uses. For example, they can be used to assess function and distribution of the proteins. The specific identified proteins may also be used as targets in methods for identifying agents that modulate intracellular calcium levels and candidate therapeutic agents. Furthermore, the identified proteins, as well as nucleic acids encoding the proteins, may be used to modulate intracellular calcium, for example, by recombinant expression of nucleic acid encoding such a protein in a cell or by reducing, altering or interfering with expression of such protein in a cell.

[0067] Provided herein are cellular constituents, particularly proteins, involved in modulating intracellular calcium. Proteins identified as being involved in modulating intracellular calcium include, but are not limited to, proteins that have an amino acid sequence that is at least about 35% homologous to a protein encoded by a Drosophila gene over at least about 40% of the encoded protein. The Drosophila gene is one that, when altered in its expression, results in altered intracellular calcium in a Drosophila cell, such as, for example, altered store-operated calcium entry into a Drosophila cell. One such Drosophila cell is an S2 cell. The identified cellular proteins include mammalian proteins, e.g., rodent and human proteins, C. elegans proteins and insect, e.g., Drosophila, proteins. Particular cellular proteins involved in modulating intracellular calcium identified herein are ion transport proteins, including ion transport proteins that do not contain one or both of the following sequences of amino acids: EWKFAR and EXD(E)CR(K)GXYXXYE (wherein “X” represents any amino acid and an amino acid residue in parentheses is an alternative to the residue immediately preceding it).

[0068] Proteins identified herein as proteins that modulate intracellular calcium include proteins homologous to a protein encoded by the coding sequence of Drosophila gene CG4536 (Genbank Accession No.

[0069] AAF46203; gi7290757; see SEQ ID NO: 1 for the gene coding sequence and SEQ ID NO: 2 for the amino acid sequence) and/or the protein encoded by coding sequence of Drosophila gene CG5842 (Genbank Accession No. AAF49752; gi7294406; see SEQ ID NO: 3 for the gene coding sequence and SEQ ID NO: 4 for the amino acid sequence). As described herein, such proteins have been identified as being involved in, participating in or modulating store-operated calcium entry. Such proteins include, but are not limited to, calcium transport protein 1 (CaT1), epithelial calcium channel (ECaC), CaT2 or CaT-like proteins, olfactory channels, stretch-activated channel proteins, vanilloid receptor-related osmotically activated channel proteins, vanilloid receptor type 1-like proteins, vanilloid receptor subtype 1 proteins, vanilloid receptor 1 proteins, vanilloid receptor-like proteins, capsaicin receptor proteins, OTRPC4 proteins, growth factor-regulated calcium channel proteins, transient receptor potential protein 12 (trp12) and stretch-inhibitable nonselective channel (SIC) proteins. Particular proteins identified herein, including, for example, ion transport proteins, have an amino acid sequence that is at least about 20%, or at least about 25%, or at least about 30%, or at least about 35%, or at least about 40%, or at least about 45%, or at least about 50% or more homologous to the protein encoded by the coding sequence of at least Drosophila gene CG5842 or gene CG4536. Such proteins may be homologous to the specified Drosophila proteins over at least about 30%, or at least about 35%, or at least about 40%, or at least about 50% or more of the protein encoded by the coding sequence of at least Drosophila gene CG5842 or CG4536. Thus, for example, particular proteins identified herein include proteins, such as, for example, ion transport proteins, that have an amino acid sequence that is at least about 35% homologous over at least about 40% of the protein encoded by the coding sequence of at least Drosophila gene CG5842 or CG4536.

[0070] Proteins identified herein as being involved in modulating intracellular calcium may participate in one or more of a number of processes that affect intracellular calcium, including, but not limited to, receptor-mediated or second messenger-operated calcium movement, calcium uptake and/or release by intracellular organelles (e.g., endoplasmic reticulum, endosomes and lysosomes) and store-operated calcium entry into cells. A direct participation of a protein in a particular process or pathway not only affects that process but can also indirectly affect one or more other processes or pathways. Thus, for example, a protein that has a direct role in a G-protein-coupled receptor signaling pathway may also indirectly affect store-operated calcium entry into a cell by affecting the release of calcium from the endoplasmic reticulum, which is involved in providing a signal for calcium entry via store-operated ion channels.

[0071] Methods are provided herein for screening for and identifying a protein (and/or nucleic acid) involved in modulating intracellular calcium. Particular methods provided herein are for screening for candidate proteins, such as ion transport proteins, that are involved in, participate in, modulate and/or provide for store-operated calcium entry into cells and for identifying such proteins.

[0072] Also provided herein are methods for identifying additional elements (e.g., proteins and other cellular or cell-associated molecules) involved in modulating intracellular calcium (and, in particular, store-operated calcium entry), identifying agents that modulate intracellular calcium (and, in particular, store-operated calcium entry) and methods for modulating intracellular calcium (and, in particular, store-operated calcium entry) and for treating diseases and disorders. Such methods can utilize or target the proteins identified herein as being involved in modulating intracellular calcium, such as, for example, by modulating or by participating in stored-operated calcium entry.

[0073] B. Cellular Signaling

[0074] All living cells sense and respond to their environment by a set of mechanisms termed cell signaling. These mechanisms are part of a complex system of communication that govern basic cellular activities and coordinate the actions of cells. Living cells must respond appropriately to their environment, whether they are free-living in the soil or part of a tissue. Cell communication is necessary for the existence of multicellular organisms. The ability of cells to perceive and correctly respond to their microenvironment is the basis of development, tissue repair, and immunity as well as normal tissue homeostasis.

[0075] Cells, through a class of proteins known as receptors, receive information from their environment. The information is then processed through signaling pathways and decoded in the nucleus and other areas of the cell. The spatial and temporal dynamics of both receptors and the components of the signaling pathways are important in the transfer of the message from the extracellular to the intracellular environment. The components of the signaling pathway, their location either inside or on the surface of the cell, the role of each component in the transduction of the signal, and interactions among the components of the system in order to transduce the signal are required to elucidate the cause, mechanism and effect of the signal transduction on the cell. Molecules that can serve as components of a signaling pathway include, but are not limited to, an organic compound, inorganic compound, metal complex, receptor, enzyme, antibody, protein, nucleic acid, peptide nucleic acid, DNA, RNA, polynucleotide, oligonucleotide, oligosaccharide, lipid, lipoprotein, amino acid, peptide, polypeptide, peptidomimetic, carbohydrate, cofactor, drug, prodrug, lectin, sugar, glycoprotein, hormone, steroid, biomolecule, macromolecule, biopolymer, polymer, sub-cellular structure, sub-cellular compartment or any combination, portion, salt, or derivative thereof, a virus, such as a viral vector or viral capsid with or without packaged nucleic acid, phage, including a phage vector or phage capsid, with or without encapsulated nucleotide acid, a cell, including eukaryotic and prokaryotic cells or fragments thereof, a liposome or micellar agent or other packaging particle, and other such biological materials. The interactions among the components of the signaling system include, but are not limited to, protein:protein, protein:nucleic acid, nucleic acid:nucleic acid, protein:lipid, lipid:lipid, protein:small molecule, receptor:signal, antibody:antigen, peptide nucleic acid:nucleic acid, and small molecule:nucleic acid.

[0076] A key component in many signaling pathways is calcium. Intracellular calcium concentration is tightly regulated, and numerous cellular constitutents, e.g., proteins, and processes are calcium sensitive. Thus, many signal transduction mechanisms involve transient calcium flux across the plasma membrane and membranes of intracellular organelles.

[0077] Errors in cellular information processing contribute to numerous diseases, including, but not limited to, cancer, autoimmunity, and diabetes. In order to effectively treat these diseases, knowledge of the mechanism by which the signal is transduced is required. Identifying the components of the signaling pathway and the message that it transmits allows for the alteration, blocking or amplification of the message and possible prevention of the undesired cellular response or activation of desired cellular response. This information can also be used in other ways such as, but not limited to, controlling the behavior of individual cells and permitting the creation of artificial tissues.

[0078] C. Calcium Homeostasis

[0079] Cellular calcium homeostasis is a result of the summation of regulatory systems involved in the control of intracellular calcium levels and movements. Cellular calcium homeostasis is achieved, at least in part, by calcium binding and by movement of calcium into and out of the cell across the plasma membrane and within the cell by movement of calcium across membranes of intracellular organelles including, for example, the endoplasmic reticulum, sarcoplasmic reticulum, mitochondria and endocytic organelles including endosomes and lysosomes.

[0080] Movement of calcium across cellular membranes is carried out by specialized proteins. For example, calcium from the extracellular space can enter the cell through various calcium channels and a sodium/calcium exchanger and is actively extruded from the cell by calcium pumps and sodium/calcium exchangers. Calcium can also be released from internal stores through inositol trisphosphate or ryanodine receptors and can be taken up by these organelles by means of calcium pumps.

[0081] Endocytosis provides another process by which cells can take up calcium from the extracellular medium through endosomes. In addition, some cells, e.g., exocrine cells, can release calcium via exocytosis.

[0082] 1. Basal or Resting Cytosolic Calcium Levels

[0083] Cytosolic calcium concentration is tightly regulated with resting levels usually estimated at approximately 0.1 μM in mammalian cells, whereas the extracellular calcium concentration is typically about 2 mM. This tight regulation facilitates transduction of signals into and within cells through transient calcium flux across the plasma membrane and membranes of intracellular organelles. As a result, disturbance of resting cytosolic calcium levels can effect transmission of such signals and give rise to defects in a number of cellular processes. For example, cell proliferation involves a prolonged calcium signaling sequence. Other cellular processes, including but not limited to, secretion, fertilization and learning, involve calcium signaling.

[0084] 2. Store-Operated Calcium Entry

[0085] One mechanism for movement of calcium into cells through the plasma membrane is commonly referred to as store-operated calcium entry. Reduced calcium concentration in intracellular calcium stores such as the endoplasmic reticulum resulting from release of calcium therefrom provides a signal for influx of calcium from the extracellular medium into the cell. This influx of calcium, which produces a sustained “plateau” elevation of cytosolic calcium concentration, generally does not rely on voltage-gated plasma membrane channels and does not involve activation of calcium channels by calcium. This calcium influx mechanism has been referred to as capacitative calcium entry (CCE), calcium-release activated, store-operated or depletion-operated calcium entry. Store-operated calcium entry can be recorded as an ionic current with distinctive properties. In some instances, this current is referred to as I_{SOC} (store-operated current) or I_{CRAC} (calcium release-activated current).

[0086] a. Regulation of Store-Operated Calcium Entry by Intracellular Calcium Stores

[0087] Store-operated calcium entry is regulated by the level of calcium within an intracellular calcium store. Intracellular calcium stores can be characterized by sensitivity to agents, which can be physiological or pharmacological, that activate release of calcium from the stores or inhibit uptake of calcium into the stores. Different cells have been studied in characterization of intracellular calcium stores, and stores have been characterized as sensitive to various agents, including, but not limited to, IP₃ and compounds that effect the IP₃ receptor, thapsigarin, ionomycin and/or cyclic ADP-ribose (cADPR) [see, e.g., Berridge (1993) Nature 361:315-325; Churchill and Louis (1999) Am. J. Physiol. 276:C426-C434; Dargie et al. (1990) Cell Regul. 1:279-290; Gerasimenko et al. (1996) Cell 84:473-480; Gromoda et al. (1995) FEBS Lett. 360:303-306; Guse et al. (1999) Nature 398:70-73].

[0088] The identities and/or cellular locations of calcium stores can be determined, for example, by isolation and characterization of organelles or imaging of cells using calcium-sensitive indicators which localize in storage organelles. Mag-fura 2, an example of one such indicator, is a UV light-excitable, ratiometric, low-affinity fluorescent calcium indicator. The moderate calcium affinity of mag-fura-2 and the tendency of its acetoxymethyl (AM) ester to accumulate in subcellular compartments makes this indicator particularly useful in monitoring of calcium stores [see, e.g., Hofer and Machen (1993) Proc. Natl. Acad. Sci. U.S.A. 90:2598-2602; Hofer et al. (1998) EMBO J. 17:1986-1995; Hofer et al. (1998) J. Cell Biol. 140:325-334; Churchill and Louis (1999) Am. J. Physiol. 276:C426-C434]. Intracellular calcium stores include the endoplasmic reticulum and sarcoplasmic reticulum, which are sensitive to IP₃ or caffeine/ryanodine and thapsigarin/cyclopiazonic acid (CPA) [see, e.g., Pozzan et al. (1994) Physiol. Rev. 74:595-637; Meldolesi and Pozzan (1998) J. Cell Biol. 142:1395-1398; Meldolesi and Pozzan (1998) Trends Biochem. Sci. 23:10-14; Golovina and Blaustein (2000) Glia 31:15-28], and isolated zymogen granules and the envelope of isolated nuclei, which are sensitive to cADPR and IP₃ [see, e.g., Gerasimenko et al. (1996) Cell 84:473-480; Gerasimenko et al. (1995) Cell 80:439-444].

[0089] Basal free calcium concentrations in calcium stores can be orders of magnitude, e.g., 10³-fold, greater than the free calcium concentration in the cytosol. For example, the basal free calcium concentration measured in the endoplasmic reticulum of HEK293 cells ranges between about 200-700 μM, with an average of about 500 μM, whereas the basal free calcium concentration in the cytosol is about 50 nM [Yu and Hinkle (2000) J. Biol. Chem. 275:23648-23653].

[0090] Free calcium concentrations in the endoplasmic reticulum can be measured in a variety of ways such as, for example, using various calcium-sensitive indicators [see, e.g., Yu and Hinkle (2000) J. Biol. Chem. 275:23648-23653] including mag-fura 2 [see, e.g., Hofer and Schulz (1996) Cell Calcium 20:235-242], endoplasmic reticulum-targeted aequorin [see, e.g., Montero et al. (1995) EMBO J. 14:5467-5475] and endoplasmic reticulum-targeted “cameleons” [i.e., fluorescent calcium indicators based on fluorescence resonance energy transfer between two modified green fluorescent proteins (GFPs) contained in a protein with calmodulin and a calmodulin-binding peptide; see, e.g., Miyawaki et al. (1997) Nature 388:882-887 and Yu and Hinkle (2000) J. Biol. Chem. 275:23648-23653].

[0091] Accumulation of calcium within endoplasmic reticulum and sarcoplasmic reticulum (SR; a specialized version of the endoplasmic reticulum in striated muscle) storage organelles is achieved through sarcoplasmic-endoplasmic reticulum calcium ATPases (SERCAs), commonly referred to as calcium pumps. During signaling (i.e., when endoplasmic reticulum channels are activated to provide for calcium release from the endoplasmic reticulum into the cytoplasm), endoplasmic reticulum calcium is replenished by the SERCA pump with cytoplasmic calcium that has entered the cell from the extracellular medium [Yu and Hinkle (2000) J. Biol. Chem. 275:23648-23653; Hofer et al. (1998) EMBO J. 17:1986-1995].

[0092] Calcium release channels associated with IP₃ and ryanodine receptors provide for controlled release of calcium from endoplasmic and sarcoplasmic reticulum into the cytoplasm resulting in transient increases in cytoplasmic calcium concentration. IP₃ receptor-mediated calcium release is triggered by IP₃ formed in the break down of plasma membrane phosphoinositides through the action of phospholipase C activated by binding of an agonist to a plasma membrane G protein-coupled receptor. Ryanodine receptor-mediated calcium release is triggered by an increase in cytoplasmic calcium and is referred to as calcium-induced calcium release (CICR). The activity of ryanodine receptors (which have affinity for ryanodine and caffeine) may also be regulated by cyclic ADP-ribose.

[0093] Thus, the calcium levels in the stores, and in the cytoplasm, fluctuate. For example, ER free calcium can decrease from a range of about 60-400 μM to about 1-50 μM when HeLa cells are treated with histamine, an agonist of PLC-linked histamine receptors [Miyawaki et al. (1997) Nature 388:882-887]. Store-operated calcium entry is activated as the free calcium concentration of the intracellular stores is reduced. Depletion of store calcium, as well as a concomitant increase in cytosolic calcium concentration, can thus regulate store-operated calcium entry into cells.

[0094] b. Store-Operated Ionic Currents

[0095] Electrophysiological analysis of store-operated or calcium release-activated currents reveals distinct biophysical properties [see, e.g., Parekh and Penner (1997) Physiol. Rev. 77:901-930] of these currents. For example, the current can be activated by depletion of intracellular calcium stores, and can be selective for divalent cations, such as calcium, over monovalent ions, can be influenced by changes in cytoplasmic calcium levels, and can show altered selectivity and conductivity in the presence of low extracellular concentrations of divalent cations.

[0096] 3. Receptor-Mediated and Second Messenger-Operated Cation Movement

[0097] Receptor-mediated cation channels are gated in response to ligand binding to a membrane receptor distinct from the channel protein itself. Some receptor-mediated cation channels are activated downstream of tyrosine kinases and others via G protein signaling cascades. Receptor-mediated channels are expressed in a number of both excitable and nonexcitable cells, including smooth muscle, mast cells, epidermis and renal mesangial cells.

[0098] One way in which receptor-mediated cation channels are regulated is through second messengers induced in response to ligand-binding to a membrane receptor. Such cation channels are referred to as second messenger-operated channels. For example, cyclic nucleotides generated by adenylyl and guanylyl cyclases can directly activate cation-permeable channels. Such cyclic nucleotide-gated channels are predominantly expressed in sensory tissues, for example the retina and in olfactory/gustatory epithelia. Calcium is another second messenger that can mediate ion channel function. Examples of calcium-mediated channels include calcium-activated potassium and chloride channels as well as cation channels in neutrophils, smooth muscle and mast cells.

[0099] Inositol phosphates generated upon activation of phospholipase C (PLC) can also act as second messengers that activate certain channels. For example, channels responsive to inositol-1,4,5-triphosphate (IP₃) include the intracellular IP₃ receptor of the endoplasmic reticulum as well as plasma membrane channels such as those expressed in T-lymphocytes, mast cells and epidermal cells. The intracellular IP₃ receptor functions as a ligand-gated ion channel that permits passage of calcium upon binding of IP₃ released through hydolysis of membrane phospholipids by activated phospholipase C (PLC). PLC can be activated through agonist binding to a surface membrane G protein-coupled receptor. Activation of the IP₃ receptor results in the release of calcium stored in the endoplasmic reticulum into the cytoplasm which produces a transient “peak” increase in cytosolic calcium concentration. In addition, although no cation channels have been identified in components of the endocytic pathway, e.g., endosomes and lysosomes, IP₃-dependent agonists appear to be associated with calcium release from lysosomes in MDCK cells (see Haller et al. (1996) Biochem. J. 319:909-912).

[0100] Lipids and polyunsaturated fatty acids (PUFAs) may also act as second messengers for the activation of ion channels. For example, arachidonic acid and its metabolites, as well as linolenic acid, can activate receptor-mediated ion channels. In addition, phospholipids, such as lysophospholipids (e.g.,lysophosphatidic acid (LPA), lysophosphatidylcholine (LPC), sphingosylphosphoryl choline (SPC) and sphingosine 1-phosphate (SIP)) can be ligands for plasma membrane receptors such as G-protein-coupled receptors (GPCRs) involved in a second messenger cascade process in cells (see, e.g., HIa et al. (2001) Science 294:1875). PLC generates not only IP₃ but also diacylglycerol (DAG) which is a potential precursor for polyunsaturated fatty acids.

[0101] PUFAs can be released from DAG by the action of DAG lipase.

[0102] 4. Calcium Uptake and Release by Endosomes and Lysosomes

[0103] Endocytosis is a process whereby contents of the cell plasma membrane and extracellular medium are transported into the interior of the cell. Not only does endocytosis serve “house-keeping” functions of a cell, it plays crucial roles in cell signaling, development, and the regulation of varied biological processes including, for example, synaptogenesis, neural plasticity, generation of morphogen gradients and programmed cell death. Endocytosis may have both negative and positive influences on signaling. For example, endocytosis can regulate the number of receptors on the plasma membrane. In addition, endocytosis plays a positive role in signaling mediated by the Notch signaling pathway which acts to determine cell-type specificity during development.

[0104] The endocytic process involves several components, including endosomes and lysosomes which are intracellular compartments along the endocytic pathway. Endosomes are morphologically heterogeneous and constitute a pleiomorphic smooth membrane system of tubular and vesicular elements. The vesicular elements contain intra-organelle vesicles and are described as multivesicular bodies. Endocytosed macromolecules are delivered first to early endosomes and then to late endosomes. Early endosomes are tubular with varicosities and many are located peripherally within the cell close to the plasma membrane. Late endosomes are more spherical and have the appearance of multivesicular bodies. They are mostly juxtanuclear being concentrated near the microtubule organizing center. Early and late endosomes are characterized by different lumenal pHs, different protein compositions and association with different small GTPases of the Rab family. The early endosome is the major sorting compartment of the endocytic pathway where many ligands dissociate from their receptors and from which many of the receptors recycle to the cell surface.

[0105] Lysosomes are membrane-bound organelles containing hydrolytic enzymes and are regarded as the terminal degradation compartment of the endocytic pathway. Lysosomes also play an important role in phagocytosis, autophagy, crinophagy and proteolysis of some cytosolic proteins that are transported across the lysosomal membrane. In many cell types, lysosomes secrete their contents after fusion with the plasma membrane. The limiting membrane of lysosomes contains a set of highly glycosylated lysosomal-associated membrane proteins (LAMPs). Additional lysosomal membrane proteins mediate transport of ions, amino acids, and other solutes across the lysosomal membrane.

[0106] In mammalian cells, the organelles of the late endocytic pathway interact with each other and are in dynamic equilibrium. Content mixing and/or exchange of membrane proteins occurs between late endosomes, lysosomes and between late endosomes and lysosomes. Delivery of endocytosed macromolecules to lysosomes occurs by content mixing between late endosomes and lysosomes as a result of transient as well as direct fusion which can form hybrid organelles. Cell-free heterotypic fusion of mammalian late endosomes and lysosomes requires calcium which may mediate its effects via calmodulin. The calcium is derived and released from the endocytic organelle lumen and is required in a late step in fusion. Although the calcium release pathway has not yet been elucidated, docking of endocytic organelles is thought to trigger release of endocytosed calcium from the lumen of endocytic organelles into the cytoplasm. This calcium release is believed to mediate membrane fusion events at several stages on the endocytic pathway. Lysosomes contain a mobilizable calcium pool. Furthermore, although no cation transport molecule has been identified in endosomes or lysosomes, both endosomal and lysosomal membranes provide for calcium transport. Thus, uptake and release of calcium from endosomes and lysosomes can impact intracellular and cytosolic calcium levels.

[0107] D. Types of Molecules that can be Involved in Modulating Intracellular Calcium

[0108] Molecules that can be involved in modulating intracellular calcium include, but are not limited to, calcium-binding proteins, ion transport proteins that are involved in providing for movement of cations, such as calcium, into, out of or within cells, and proteins that regulate ion transport proteins, receptors or calcium-binding proteins. A molecule involved in modulating intracellular calcium can do so at any level and in connection with any of a number of processes within a cell. For example, a molecule involved in modulating intracellular calcium may participate in the maintenance of resting cytosolic calcium levels, store-operated calcium entry into cells, receptor-mediated calcium movement, second messenger-operated calcium movement, calcium influx into or efflux from a cell, and/or calcium uptake into or release from intracellular compartments, including, for example, the endoplasmic reticulum, endosomes and lysosomes. A molecule involved in modulating intracellular calcium may function alone (e.g., as a single unit or as a homo-multimer of two or more of the proteins) or in combination with other proteins (e.g., in a heteromeric configuration), and may be involved in regulating proteins that bind and/or transport calcium or receptors, particularly receptors involved in receptor-mediated cation movement or cell signaling.

[0109] 1. Ion Transport Proteins

[0110] Ion transport proteins are proteins involved in providing for the transport of ions into, within, or out of cells. Ion transport proteins involved in modulating intracellular calcium are involved in providing for the transport of calcium. Such ion transport proteins may be relatively specific for calcium ion transport.

[0111] a. Structural Features of Ion Transport Proteins

[0112] An ion transport protein may function to transport cations in a number of ways. For example, the proteins may form a pore or channel for the transport of cations through a membrane. The proteins may instead provide for a translocation of cations through ion binding and release processes as is characteristic of a transporter. Ion transport proteins may function to transport ions as a single unit or may be one unit of a multi-component structure that transports ions. A multi-component structure may be a homo-multimer of two or more of the same proteins or a hetero-multimer of two or more different proteins.

[0113] Ion transport proteins involved in providing for movement of ions via a channel-like or pore structure typically contain one or multiple regions that have characteristics of transmembrane domains, which may possibly participate in channel formation. Transmembrane domains tend to include a sequence of amino acids, typically of about 10 to about 30 or more amino acids, about 15 to about 30 or more amino acids, about 20 to about 30 or more amino acids, or about 20 to about 25 amino acids, of high hydrophobicity. The hydrophobicity scale is defined from the transfer free energy of amino acids between organic solvents and water, and statistics on the distribution of residues in proteins. Hydropathy plots of the hydrophobicity of adjacent amino acid residues averaged over a moving window of suitable length are commonly used to assess proteins for such sequences of amino acids [see, e.g., Kyte and Doolittle (1982) J. Mol. Biol. 157:105-134; Argos et al. (1982) Eur. J. Biochem. 128:565-575 and Engelman et al. (1984) Ann. Rev. Biophys. Biophys. Chem. 15:321-353]. Although transmembrane domains may be in an α-helical and/or β-sheet conformation, the transmembrane domain structure of most major families of ion channel proteins appears to be α-helical.

[0114] Pore-lining segments of ion transport protein channel transmembrane domains, such as regions lining aqueous channels, may have a partly hydrophilic face and appear as amphipathic segments. Amphipathic segments may be identified based on the hydrophobic moment [see, e.g., Eisenberg et al. (1984) J. Mol. Biol. 179:125-142; and Finer-Moore and Stroud (1984) Proc. Natl. Acad. U.S.A. 81:155-159].

[0115] The number of transmembrane domains contained in an ion transport protein that includes a channel-like structure can vary. For example, there can be at least one transmembrane domain contained in a protein involved in providing for ion transport. Thus, for example, there can be one, two, three, four, five, six or more transmembrane domains contained in a protein involved in providing for ion transport.Typically, there are at least about 1 to about 25 or more transmembrane domains, about 2 to about 25 or more transmembrane domains, about 4 to about 25 or more transmembrane domains, about 6 to about 25 or more transmembrane domains, about 8 to about 25 or more transmembrane domains, or about 1 or 2 to about 8 transmembrane domains or about 6 or more transmembrane domains. For example, an ion transport protein that includes a channel-like structure and is capable of providing for the movement of cations through a membrane may contain at least one, or at least two, or at least three or at least 4 or more groups of six transmembrane helices.

[0116] b. Calcium Transport

[0117] Ion transport proteins that modulate intracellular calcium are involved in the transport of calcium. Calcium transport may be assessed in a variety ways. For example, cells expressing an ion transport protein may be evaluated for uptake of labeled calcium, such as ⁴⁵Ca²⁺, into the cells. RNA coding for an ion transport protein may also be introduced into a cell, e.g., Xenopus laevis oocytes, which may be evaluated for ⁴⁵Ca²⁺ uptake.

[0118] Calcium transport properties of an ion transport protein may also be assessed using calcium indicator-based assays of the intracellular calcium levels of cells expressing the protein. Such assays utilize calcium-sensitive indicators which facilitate detection of transient alterations in intracellular calcium levels. These indicators provide a detectable signal, e.g., fluorescence or bioluminescence, upon binding of calcium and therefore can be correlated to calcium levels in cells. Methods of measuring intracellular calcium using calcium indicators are well known in the art [see, e.g., Takahashi et al. (1999) Physiol. Rev. 79:1089-1125].

[0119] Electrophysiological analysis of cells expressing an ion transport protein also can be used to assess calcium transport by a transport protein. For example, whole-cell, patch-clamp, voltage clamp and single-channel recording methods may be used to detect and measure calcium or other cation currents across membranes of cells to which calcium or another cation has been applied. A variety of cells may be used for such electrophysiological analysis, including, but not limited to, X. laevis oocytes into which RNA encoding an ion transport protein has been injected.

[0120] Ion transport protein(s) involved in calcium regulation may be more permeable to calcium than to monovalent ions under physiological conditions. Thus, such types of proteins are able to flux calcium through the membrane more readily than monovalent ions. For example, the permeability of an ion transport protein to calcium may be more than about 1.5-fold, more than about 2-fold, more than about 3-fold, more than about 4-fold, more than about 5-fold, more than about 6-fold, more than about 7-fold, more than about 8-fold, more than about 9-fold or more than about 10-fold greater than the permeability to monovalent ions. Ion transport proteins may be selective for calcium under physiological conditions.

[0121] 2. Modulatory or Regulatory Molecules

[0122] In addition to ion transport proteins, there may be cellular molecules that are involved in modulating intracellular calcium but that are not directly involved in providing for the transport of ions into or out of the cytosol as would, for example, a channel protein. Such molecules, which can be referred to as modulatory or regulatory molecules (i.e., modulators or regulators), encompass a diverse array of structures and include receptors, enzymes and calcium-binding proteins. Modulator or regulator molecules can, for example, function in processing a signal in a cell (e.g., signaling pathway components) or regulate the activity of an enzyme or ion channel.

[0123] For example, some calcium-binding proteins can be involved in modulating intracellular calcium. Included among the calcium-binding proteins are proteins that contain a calcium binding motif referred to as an EF-hand [see, e.g., Kretsinger (1997) Nat. Struct. Biol. 4:514-516; Ikura (1996) Trends Biochem. Sci. 21:14-17; Kawasaki et al. (1995) Protein Profile 2:297-490]. Typically, an EF-hand motif contains a loop of about 12 amino acid residues flanked on either side by an alpha helix of about 12 amino acid residues. Position 12 of the loop typically contains a Glu or Asp. The helix-loop-helix motif can be repeated from about 2 to about 12 times. The motifs may coordinate calcium to side-chain oxygens of invariant residues occupying positions 1, 3, 5 and 12 of the loop, and to a carbonyl oxygen of a less conserved residue at position 7. EF hand-containing proteins may undergo a conformational change upon binding calcium, and thus some of these proteins can pass signaling information on to targets to which such proteins can bind. EF hand proteins can function in a number of ways. For example, they can function as a separate subunit of a single protein (e.g., enzyme), as a subunit that reversibly associates with different proteins (e.g., calmodulin) or as an integral portion of the sequence of an enzyme (e.g., calpain).

[0124] An example of an EF hand protein is calmodulin (CaM). Calmodulin interacts with numerous diverse proteins, including, for example, CaM-dependent serine/threonine kinases, CaM kinase II, CaM kinase kinase and myosin light chain kinase, calcineurin, CaM-calcium-activated potassium channel and anthrax adenylyl cyclase. The roles of CaM binding to such target proteins include, for example, release of autoinhibitory domains of kinases, CaM tethering and calcium-dependent inactivation of the target protein, active site remodeling of adenylyl cyclase, dimerization and activation of channel proteins. CaM recruitment motifs of CaM-binding domains of CaM-dependent proteins have been predicted (see, e.g., Rhoads and Friedberg (1997) FASEB J. 11:331-340; Hoeflich and Ikura (2002) Cell 108:739-742 and http://calcium.uhnres.utoronto.ca). An example of a CaM-binding motif is an “IQ motif” having the following consensus sequence which can be present in tandem repeats: IQXXXRGXXXR.

[0125] Neuronal calcium sensor (NCS) proteins also contain EF hand motifs. These proteins are expressed predominantly or solely in retinal photoreceptors or neurons. Five subfamilies of NCS proteins have been described: two expressed in retinal photoreceptors (recoverins, which inhibit rhodopsin kinase, and the guanylate cyclase-activating proteins (GCAPs)) and three expressed in central neurons and neuroendocrine cells (frequenins, visinin-like proteins and the Kv channel-interacting proteins) (see, e.g., Burgoyne and Weiss (2002) Biochem. J. 353:1-12). The latter three subfamilies may regulate neurotransmitter release, polyphosphoinositide biosynthesis, cyclic nucleotide metabolism and the activity of type A potassium channels. The NCS proteins undergo conformational changes upon binding calcium and have thus been referred to as calcium sensors or switches. Most NCS proteins are N-terminally myristoylated, and, after binding of calcium, the myristoyl residue and hydrophobic portions of the sequence are exposed favoring interaction with membranes or target proteins.

[0126] Another family of EF hand-containing proteins is the calpain family of intracellular cysteine proteases. These proteins modulate biological activities of their substrates by limited proteolysis. The protease core region of the μ isoform of calpain appears to also contain two non-EF hand calcium-binding sites. Binding of calcium at these sites aligns the active site cleft and converts the core into an active enzyme with calpain-like specificity (see, e.g., Moldoveanu et al. (2002) Cell 108:649-660). Thus, there are at least three different types of calcium-binding sites in calpains: EF-hand, C2-like domain and protease domain sites.

[0127] E. Methods of Screening for and Identifying Proteins Involved in Modulating Intracellular Calcium

[0128] Methods are provided herein for screening for and identifying proteins, and/or nucleic acids that encode proteins, involved in modulating intracellular calcium. Such proteins include, but are not limited to, calcium-binding proteins, ion transport proteins that are involved in providing for movement of cations, such as calcium, into, out of or within cells, receptors and enzymes as well as proteins that regulate ion transport proteins, receptors, enzymes or calcium-binding proteins. In a particular embodiment, methods provided herein are for screening for and identifying proteins, and/or nucleic acids that encode proteins, that are involved in, participate in, regulate and/or provide for store-operated calcium entry into cells.

[0129] Intracellular calcium-modulating protein identification methods provided herein involve reduction, alteration or elimination of the expression of one or more genes in a cell and assessing intracellular and/or cytosolic calcium levels and/or calcium movement into, out of or within the cell following reduction, alteration or elimination of the expression of one or more genes. In particular embodiments of the methods, store-operated calcium entry, resting cytosolic calcium levels and/or intracellular organelle (e.g., endoplasmic reticulum) calcium levels, uptake or release is (are) assessed following reduction, alteration or elimination of the expression of one or more genes. The methods are useful in identifying new proteins and/or nucleic acids encoding new proteins that were previously unknown and that are involved in modulating intracellular calcium. The methods are also useful in identifying known proteins that have not been associated with intracellular calcium modulation, or that have not been associated with a particular aspect of intracellular calcium modulation (such as store-operated calcium entry or uptake or release of calcium from intracellular organelles), as intracellular calcium-modulating proteins or as being involved in, participating in or providing for store-operated calcium entry, maintenance of resting cytosolic calcium levels or calcium uptake, release or storage by intracellular organelles.

[0130] 1. Cells for use in Methods for Screening for and Identifying Proteins Involved in Modulating Intracellular Calcium

[0131] a. General Features of Cells

[0132] The methods for identifying a protein (and/or nucleic acid encoding a protein) involved in modulating intracellular calcium involve reduction, alteration or elimination of the expression of one or more genes in a cell and the assessment of intracellular and/or cytosolic calcium levels and/or calcium movement into, within or out of the cells. Although any cell may be used in the methods, cells that are particularly suitable are those that exhibit one or more calcium transport processes and/or those in which calcium levels and/or movement may readily be assessed.

[0133] Another feature of cells that are particularly suitable for use in the screening and identification methods is amenability to gene expression alteration. A number of techniques for altering gene expression in cells are known in the art and described herein. The relative ease with which these techniques may be applied to a cell to effect reduction, alteration or elimination of one or more genes in the cell is a consideration in selection of cells for use in the methods provided herein. Amenability to gene expression alteration and analysis of ion flux particularly may be considerations, for example, when a number of genes will be screened.

[0134] In particular embodiments of the methods, the cells used in the method are from an organism whose genome has been extensively sequenced. Included among such organisms are non-mammalian eukaryotic organisms, such as Drosophila (in particular D. melanogaster), Caenorhabditis (in particular, C. elegans), Anopheles (in particular, A. gambiae), pufferfish (in particular, Fugu rubripes) and zebrafish (in particular, Danio rerio) and mammals, such as, for example, rodents and humans. The design of elements such as nucleic acids used in altering gene expression (e.g., in antisense RNA, RNA interference and gene knock-out or knock-in methods) in such cells is greatly facilitated by the availability of genomic sequence information.

[0135] Cell type may also be a consideration when it is desired to identify an intracellular calcium-modulating protein of a particular cell type or that is involved in a particular aspect of calcium modulation. For example, for identification of a protein involved in store-operated calcium entry, a cell used in the method could be one that exhibits store-operated calcium entry, and a particular cell could be a central nervous system (CNS) cell.

[0136] b. Cells that Exhibit Store-Operated Calcium Entry

[0137] In a particular method for identifying a protein (and/or nucleic acid encoding a protein) that modulates intracellular calcium, the cell used is one that exhibits store-operated calcium entry. In such methods, store-operated calcium entry can be assessed following reduction, alteration or elimination of the expression of one or more genes in the cell to identify proteins (and/or nucleic acids encoding proteins) that are involved in, participate in, regulate and/or provide for store-operated calcium entry. Cells that exhibit store-operated calcium entry can readily be identified. Any method of determining the occurrence of calcium entry into a cell that distinguishes store-operated calcium entry from other types of calcium influx (e.g., entry through voltage-gated calcium channels) can be used to determine if a cell exhibits store-operated calcium entry. Cells that exhibit store-operated calcium entry include insect cells, e.g., Drosophila cells (e.g., Schneider 2 or S2 cells), human embryonic kidney (HEK) cells, neuronal or nervous system cells, e.g., SHSY5Y neuroblastoma cells and PC12 cells, rat basophilic leukemia (RBL) cells, and immune system cells, e.g., lymphocytes such as T lymphocytes, including Jurkat cells.

[0138] For example, in one method for detecting store-operated transport of calcium across the plasma membrane, cells may be treated to reduce the calcium levels of intracellular calcium stores and then analyzed for evidence of calcium influx in response thereto. Techniques for reducing calcium levels of intracellular stores and for analyzing cells for evidence of calcium influx are known in the art and described herein.

[0139] In other methods, diffusable signals may be used to activate store-operated transport of calcium across the plasma membrane in methods of detecting the same. One such signal is referred to as calcium influx factor (CIF) [see, e.g., Randriamampita and Tsien (1993) Nature 364:809-814; Parekh et al. (1993) Nature 364:814-818; Csutora et al. (1999) Proc. Natl. Acad. Sci. U.S.A. 96:121-126], which may be a small (˜<500D) phosphate-containing anion. A CIF activity from thapsigargin-treated Jurkat cells, as well as a similar activity from calcium pump-deficient yeast, can activate calcium influx in Xenopus oocytes and in Jurkat cells. When included in the patch pipette during whole-cell patch clamp of Jurkat cells, the extracts activate an inward current resembling I_{CRAC}.

[0140] In other methods, electrophysiological analysis of currents across a cell-detached plasma membrane patch of a cell may be used to detect currents associated with or characteristic of store-operated transport of calcium.

[0141] (1) Reduction of Calcium Levels of Intracellular Stores

[0142] A variety of cell treatments may be used to reduce calcium levels in intracellular calcium stores. Generally, the treatments can be viewed as either an active direct reduction in calcium levels, such as by removal of free calcium from the stores (i.e., “active” depletion), or a passive reduction in calcium levels, such as by leak of calcium from the stores either by a reduction in the availability of free calcium for filling or replenishing the stores or by preventing filling or replenishing of stores (i.e., “passive” depletion).

[0143] (a) Passive Depletion

[0144] One method of reducing the availability of calcium for the internal calcium stores is to decrease the calcium concentration of the extracellular medium and/or cytoplasm. Calcium concentrations of these fluids can be decreased using cation, and particularly calcium, chelators including, but not limited to EGTA and 1,2-bis (2-amino-phenoxy)ethane-N,N,N,N′-tetraacetic acid (BAPTA). For example, cells may be equilibrated in 10 mM external calcium with strong buffering of cytosolic calcium, for example, through dialysis with 10 mM EGTA. Alternatively, reduction of external calcium may also deplete intracellular calcium stores in many types of cells. For example, cells may be incubated in nominally free calcium solution, e.g., 10 μM external calcium, or essentially calcium-free solution, e.g., ˜1 nM external calcium with strongly (e.g., 10 mM EGTA) buffered cytosolic calcium.

[0145] Reduction of calcium in intracellular calcium stores can also be accomplished by application of an agent that blocks endoplasmic reticulum calcium ATPase pumps (SERCAs), thereby reducing or preventing refilling of the endoplasmic reticulum with calcium and providing for leak of calcium from the ER into the cytoplasm resulting in a reduction of ER free calcium concentration. For example, ER free calcium concentration may decrease from about 500 μM to about 50-100 μM as has been observed in HEK293 cells [Yu and Hinkle (2000) J. Biol. Chem. 275:23648-23653. Such agents include, but are not limited to, thapsigargin, cyclopiazonic acid (CPA) and di-tert-butyl-hydroquinone (tBHQ).

[0146] (b) Active Depletion

[0147] Active reduction of calcium levels in intracellular calcium stores can be experimentally implemented in a number of ways. For example, exposure of endoplasmic reticulum inositol-1,4,5-triphosphate (IP₃) receptors to IP₃ or derivatives or analogs thereof provides for release of calcium from this calcium store and serves to reduce calcium levels therein. IP₃ or derivatives or analogs thereof can be provided to the endoplasmic reticulum through direct intracellular application, through application to the plasma membrane (using membrane-permeable derivatives of IP₃) or by contacting cells with an agent that activates the phosphoinositide cascade to generate IP₃. Such activating agents include agonists of plasma membrane receptors linked to activation of PLC and agents that activate PLC downstream of the plasma membrane in the signalling cascade. Examples of G protein-coupled receptor agonists include histamine, muscarine, carbachol, substance P and glutamate. When activation of the phosphoinositide cascade is used to actively deplete store calcium, the cell used in the method can be one that expresses, either endogenously or recombinantly, a membrane receptor linked to phospholipase C activation, such as, for example, muscarinic receptors, Bradykinin receptors. Additionally, inhibition of catabolic enzymes involved in degradation of IP₃ can serve to provide IP₃ for interaction with its receptor.

[0148] A membrane-permeant cation chelator that can chelate calcium within internal stores may also be used to reduce free calcium levels of the stores. One such chelator is N,N,N′,N′-tetrakis (2-pyridylmethyl)ethylene diamine (TPEN), which, in its uncomplexed form, diffuses across cell membranes [see, e.g., Hofer et al. (1998) J. Cell Biol. 140:325-334]. Because this multivalent cation chelator has a low affinity for calcium, it should not significantly influence calcium levels in the cytoplasm or other cell compartments where the steady-state calcium concentration is in the nanomolar or low micromolar range. In cell compartments where the calcium concentration is comparable to its K_{d}, such as, for example, the endoplasmic reticulum, TPEN should bind calcium to rapidly reduce free calcium levels. Removal of TPEN from the cell medium should provide for increases in free calcium levels in such cell compartments due to rapid unbinding of the chelator from calcium ions and diffusion of the free form of TPEN from the compartment. Thus, TPEN may be used to reversibly manipulate store calcium levels without interfering with other aspects of calcium homeostasis. lonophores, e.g., ionomycin (a Ca²⁺/proton ionophore), also may be used for active depletion of intracellular calcium stores by embedding in the ER membrane and providing a pore-like mechanism for movement of calcium out of the ER.

[0149] (2) Analysis of Ion Flux

[0150] Determining whether a cell exhibits store-operated calcium entry, or determining calcium movement into, out of or within a cell in general, can include a step of detecting and/or analyzing ion flux into cells and/or the cytoplasm or across a membrane. Techniques for detection and analysis of ion flux into cells are well known in the art. Typically, when using ion flux as a way to determine whether a cell exhibits store-operated calcium entry, cells may be exposed to conditions that activate store-operated calcium entry, including those described herein, such as treatment with an agonist that results in generation of IP₃, internal perfusion with IP₃, treatment with a store-depletion agent e.g., thapsigargin, or buffering of cytoplasmic calcium, and are then analyzed for evidence of movement of ions out of intracellular organelles and/or movement of ions into the cells. Depending on the assay conditions, the ion may be a calcium or other cation, for example sodium or manganese, that can be transported via a store-operated ion transport protein.

[0151] For example, ion flux, such as that which occurs in store-operated calcium entry, can be measured electrophysiologically using patch clamp methods [see, e.g., Hamil et al.(1981) Pflugers Arch, 391:85-100; Hoffman et al. (1999) Nature 397:259-263; and Krause et al. (1999) J. Biol. Chem. 274:36957-36962] to record the inward Ca²⁺ current. The current may be highly selective for Ca²⁺ divalent ions, may display negative feedback regulation by Ca²⁺ [see, e.g., Zweifach and Lewis (1995) J. Gen. Physiol. 105:209-226], and may be inhibited by divalent and trivalent metal ions such as Zn²⁺, Ni²⁺, Gd³⁺ and La³⁺[Parekh and Penner (1997) Physiol. Rev. 77:901-930]. Negative feedback by Ca²⁺ can be eliminated by the inclusion of very high concentrations of Ca²⁺ buffers in the patch pipet. In the absence of these buffers or with buffers of lower capacity, the current may be too small to be detected, although Ca²⁺ entry clearly occurs. The current may be strongly inwardly rectifying and may lose its property of inward rectification in the complete absence of divalent cations. It may be possible to determine the time course of activation of the current in single cells followed by passive store depletion via patch pipettes containing Ca²⁺ chelating reagent BAPTA in the whole cell configuration using Na²⁺ used as the charge carrier [Kerschbaum and Cahalan (1999) Science 283:836].

[0152] The electrophysiological measurement/recording of currents associated with store-operated ion flux through a membrane, e.g., currents through store-operated ion channels, can provide for the assessment of such biophysiological properties as kinetics, voltage dependence, ionic selectivity. The electrophysiological measurement can be performed by using whole cell patch clamp methods which can allow for the reliable and prescise determination of the conditions under which Ca²⁺ influx occurs. As described by Hofman et al. [(1999) Nature 397:259-263], the patch clamp technique can be used in whole-cell, cell-attached and inside-out mode.

[0153] Additionally patch clamp methods can be performed in a tight seal whole cell, configuration. Variations of the patch-clamp technique or other methods for detecting and analyzing ionic activity of cells, which are routine in the art, can also be used.

[0154] Measurement of changes of intracellular ions, such as cations including Ca²⁺, can also can also be performed using fluorescence imaging, such as fluorescence videomicroscopy, digital imaging or ratioimaging techniques. Measurement of changes in intracellular Ca²⁺ ([Ca²⁺]ᵢ) in individual cells by fluorescence videomicroscopy can be performed using digital imaging system such as that produced by T.I.L.L.

[0155] Photonics or the Attoflour Digital Imaging and Photometry attachment of a Carl Zeis axiovert inverted microscope. Typically cells can be grown on coverslips, rinsed and incubated with 5 μM fura2/AM (Molecular Probes) at 37° C. for 30 minutes and then washed with HPSS. The coverslips with the cells are then typically clamped into a circular open-bottom chamber and mounted onto the stage of a microscope. [Ca²⁺]ᵢ can be calculated from fluorescence ratios obtained at 340 and 380 nm excitation wavelengths [Garcia et. al (1994) J. Neurosci. 14: 1233-1246]. Modified protocols such as those described by Zitt et. al. [(1997) J. Cell Biol. 138: 1333-1341] and alternate forms of fluorescence ratioimaging may also be used.

[0156] Calcium-sensitive indicators, such as fluo-3 (e.g., Catalog No. F-1241, Molecular Probes, Inc., Eugene, Oreg.), are available as acetoxymethyl esters which are membrane permeable. When the acetoxymethyl ester form of the indicator enters a cell, the ester group is removed by cytosolic esterases, thereby trapping the free indicator in the cytosol. Interaction of the free indicator with calcium results in increased fluorescence of the indicator; therefore, an increase in the intracellular Ca²⁺ concentration of cells containing the indicator can be expressed directly as an increase in fluorescence.

[0157] Additionally, calcium flux in a cell may be monitored using a reporter expression system. In such a system, the cell in which calcium levels and fluctuations therein are monitored may contain a reporter gene encoding a detectable signal, such as luciferase, which is linked to a transcription regulatory element, e.g., promoter, that is induced by calcium-dependent factors.

[0158] 3. Reduction, Alteration or Elimination of the Expression of One or More Genes in a Cell

[0159] In the methods described herein for identifying a protein (and/or nucleic acid encoding a protein) involved in modulating intracellular calcium, a cell is subjected to conditions whereby the expression of one or more genes in the cell is reduced, altered or eliminated. The resulting cell is analyzed to determine the effects of reduction, alteration or elimination of gene expression on intracellular calcium. A protein (and/or nucleic acid encoding a protein) that can modulate intracellular calcium is identified by a cell in which reduction, alteration or elimination of the expression of a gene is accompanied by an alteration in intracellular calcium and/or calcium (or other cation or charge carrier) movement into, out of or within a cell.

[0160] The methods provided herein for identifying a protein (and/or nucleic acid encoding a protein) involved in modulating intracellular calcium are function-based and, importantly, specific; that is, they provide a direct, one-to-one correlation between a protein (and/or nucleic acid encoding a protein) that can be one expressed in its native cellular environment and cell calcium, and, in particular embodiments, resting cytosolic calcium levels, intracellular organelle calcium levels/uptake/release and/or store-operated ion flux. This correlation is determined by the association of altered expression of a gene with alterations in cell calcium and/or movement of calcium (or other cation or charge carrier) into, out of or within cells, such as, for example, store-operated ion flux or intracellular organelle (e.g., endoplasmic reticulum) calcium levels, uptake or release. Thus, for example, particular embodiments of the methods provided herein involve identification of a gene that, when expressed in an altered fashion (including reduced or eliminated expression), results in altered, reduced or eliminated store-operated ion entry in a cell that contains the gene. The protein encoded by the identified gene is thereby identified as an intracellular calcium-modulating protein, such as, for example, an ion transport protein, involved in maintenance of resting cytosolic calcium levels, intracellular organelle calcium storage, uptake or release and/or store-operated calcium entry.

[0161] Techniques for altering gene expression in a cell are known in the art and described herein. Any such procedures may be used in intracellular calcium-modulating protein identification methods provided herein. With respect to these methods, the alteration in gene expression need only be such that any associated alteration in cell calcium and/or calcium (or other cation or charge carrier) into, out of or within a cell, e.g., store-operated calcium entry, is detectable.

[0162] The alteration may be one that completely or nearly completely eliminates expression of a gene in the cell. If the gene is one that encodes a protein involved in maintenance of resting cytosolic calcium levels in the cell, then it may be identified, for example, by an alteration of resting cytosolic calcium levels in a cell in which expression of the gene has been eliminated. An alteration of resting cytosolic calcium levels includes increases and decreases in resting cytosolic calcium levels. If the gene is one that encodes a protein that is principally involved in providing for store-operated calcium influx in the cell, then it may be identified through complete or nearly complete elimination of store-operated ion flux into the cell. Furthermore, if the gene is one that encodes a protein that substantially participates in but is not principally involved in providing for store-operated calcium influx into the cell, then completely eliminating expression of the gene may identify the gene by an alteration and/or reduction, but perhaps not complete elimination, of store-operated ion flux into the cell. For example, if a gene encodes a protein that is involved in modulating or regulating store-operated calcium entry or encodes an ion transport protein that provides for or is involved in store-operated calcium influx by being a component, such as a subunit, of a multi-subunit complex (e.g., heteromeric complex) providing for store-operated calcium influx, then complete or near complete elimination of expression of the gene may result in altered store-operated ion current properties, e.g., ion selectivity and/or conductance, reduced or even increased store-operated ion flux into the cell. If the gene is one that encodes a protein that is involved in modulating intracellular organelle (e.g., endoplasmic reticulum) calcium, then complete or near complete elimination of expression of the gene may result in an alteration in the calcium level of the organelle and/or in complete or nearly complete elimination of calcium movement into or out of the organelle (e.g., if the gene encodes an organelle ion transport protein) or in altered properties of the movement of calcium into or out of the organelle (e.g., if the gene encodes a protein that regulates or modulates, or that is not principally involved in providing for, calcium movement into or out of the organelle).

[0163] The alteration in gene expression may be one that only partially eliminates expression of a gene in the cell. In such an instance, for example, if the gene is one that encodes a protein that is principally involved in providing for store-operated calcium influx in the cell, then it may be identified through a partial reduction of store-operated ion flux into the cell. If the gene is one that encodes a protein that substantially participates in but is not principally involved in providing for store-operated calcium influx into the cell, then partial elimination of expression of the gene may identify the gene by an alteration and/or reduction of store-operated ion flux into the cell.

[0164] The methods include embodiments where the expression of two or more genes, or a “pool” of genes is altered in a cell. Thus, for example, if a combination of the genes encodes a combination of components, each of which participates in an ion transport process that provides for store-operated calcium influx into a cell, then complete or nearly complete elimination of expression of the combination of genes may identify the combination of genes by complete or nearly complete elimination of store-operated ion flux into the cell.

[0165] Thus, an “alteration” of cell calcium or calcium movement into, out of or within a cell can be a complete or nearly complete elimination of the activity, an alteration in properties or characteristics of the activity or an increase in the activity. Similarly, an “alteration” in gene expression may be complete or nearly complete elimination of the expression of a gene, a reduction in the expression of a gene, an increase in the expression of a gene, or an alteration in the protein encoded by the gene (such as truncation or other alteration that effectively renders the protein nonfunctional or provides for aberrant functioning of the protein).

[0166] Methods for assessing the type and extent of an alteration in gene expression are known in the art. For example, the level and characteristics (e.g., size) of a transcript (e.g., mRNA) generated from a gene can be evaluated by Northern blot analysis employing nucleic acid probes that specifically hybridize to the transcript or by reverse transcriptase PCR (RT-PCR) nucleic acid amplification. The level and characteristics (e.g., size and immunoreactivity) of a protein encoded by a gene can be evaluated by western blot or other immunoassays employing antibodies that specifically bind the protein.

[0167] a. RNA-Based Methods of Altering Gene Expression

[0168] (1) Antisense Methods

[0169] Introduction into a cell of nucleic acid complementary to an RNA transcript encoded by a gene within the cell can be used to alter expression of the gene. Such an approach may be referred to as an “antisense” RNA method when a single-stranded nucleic acid molecule is introduced into a cell [see, e.g., Izant and Weintraub (1984) Cell 36:1007-1015]. RNA can be synthesized from, for example, phagemid clones containing DNA corresponding to a gene to be targeted for alteration of expression, using T3 and T7 polymerase. DNA templates may be removed by DNase treatments. Antisense RNA is then introduced into a cell and after an appropriate period, store-operated ion flux of the cell is evaluated and compared to such ion flux in the cell prior to introduction of antisense RNA or to store-operated ion flux in a substantially similar cell that has not received antisense RNA. Antisense RNA may also be expressed in a cell by transfecting the cell with a plasmid containing nucleic acid coding for antisense RNA.

[0170] (2) RNA Interference (RNAi) Methods

[0171] RNA interference (RNAi) is a method of gene silencing which involves the introduction of double-stranded RNA (dsRNA) into cells. The basic premise of RNAi is the ability of double-stranded RNA (dsRNA) to specifically block expression of its homologous gene when present in cells. Thus, in performing RNAi, a dsRNA construct containing a nucleotide sequence with homology to or identical to a portion of the target gene to be silenced is introduced into or generated within a cell containing the target gene. Generally, in the RNAi reaction, both strands (sense and antisense) of the dsRNA are processed to small RNA fragments or segments (referred to as small interfering RNAs, siRNAs or guide RNAs) of from about 21-23 nucleotides (nt) in length. Processing of the dsRNA to the small RNA fragments does not require the targeted mRNA, which demonstrates that the small RNA species is generated by processing of the dsRNA and not as a product of dsRNA-targeted mRNA degradation. The mRNA is cleaved only within the region of identity with the dsRNA. Cleavage occurs at sites 21-23 nucleotides apart, the same interval observed for the dsRNA itself, suggesting that the 21-23 nucleotide fragments from the dsRNA are guiding mRNA cleavage. The RNAi phenomenon is mediated by a set of enzyme activities that are evolutionarily conserved in eukaryotes ranging from plants to mammals.

[0172] After partial purification, a multi-component nuclease (RISC nuclease) co-fractionates with the dsRNA fragments which may confer specificity to the nuclease through homology to the substrate mRNAs. It is believed that the dsRNA fragments instruct the RISC nuclease to destroy specific mRNAs corresponding to the dsRNA sequences. An additional enzyme, Dicer, has been identified that can produce the guide RNAs. Dicer is a member of the RNAse III family of nucleases that specifically cleave dsRNA and is evolutionarily conserved in worms, flies, plants, fungi and mammals. The enzyme has a distinctive structure which includes a helicase domain and dual RNAse III motifs. Dicer also contains a region of homology to the RDE1/QDE2/ARGONAUTE family, which have been genetically linked to RNAi in lower eukaryotes. Activation, or overexpression, of Dicer and/or Argonaute is, thus, useful for facilitating RNAi in cells, such as cultured eukaryotic cells, or mammalian cells in culture or in whole organisms.

[0173] Mammalian cells exhibit an interferon-mediated antiviral response to long dsRNA that results in diminished protein synthesis. This response makes it difficult to utilize long dsRNA in RNA interference of mammalian cells. Thus, for RNAi of mammalian cells, short interfering dsRNAs of about 21 nucleotides can be used which do not activate the antiviral response [see, e.g., Elbashir et al. (2001) Nature 411:494-498]. Additionally, cells can be treated with an agent(s) that inhibits the double-stranded RNA-dependent protein known as PKR (protein kinase RNA-activated). Part of the interferon response is the activation of the PKR response. PKR phosphorylates and inactivates elF2a. Inactivation of elF2α results in inhibition of protein synthesis and ultimately apoptosis. This sequence-independent PKR response can be overcome in favor of the sequence-specific RNAi response without altering the activity of PKR; however, in certain instances, it may be desirable to treat the cells with agents which inhibit expression of PKR, cause its destruction, and/or inhibit the kinase activity of PKR. Likewise, overexpression of an agent which ectopically activates elF2a can be used.

[0174] The double-stranded structure may be formed by a single self-complementary RNA strand or two complementary RNA strands. The dsRNA construct may include modifications to either the phosphate-sugar backbone or the nucleoside. The backbone may be modified for stability or for other reasons. The phosphodiester linkages may be modified to include at least one of a nitrogen or sulfur heteroatom. RNA duplex formation may be initiated either inside or outside the cell. The RNA may be introduced in an amount which allows delivery of at least one copy per cell. Higher doses (e.g., at least 5, 10, 100, 500, or 1000 copies per cell) of double-stranded material may yield more effective inhibition; lower doses may be useful for specific applications. Inhibition is sequence-specific in that nucleotide sequences corresponding to the duplex region of the RNA are targeted for genetic inhibition.

[0175] Double-stranded RNA constructs containing a nucleotide sequence identical to a portion of the target gene are generally most effective in the inhibition of target gene expression. RNA sequences with insertions, deletions, and single point mutations relative to the target sequence have also been found to be effective for inhibition. Sequence identity may be optimized by sequence comparison and alignment algorithms known in the art [see e.g., Gribskov and Devereux, Sequence Analysis Primer, Stickton Press, 1991] and calculating the percent difference between the nucleotide sequences by, for example, the Smith-Waterman algorithm as inplemented in the BESTFIT software program using default parameters (e.g., University of Wisconsin Genetic Computing Group). Greater than 90% sequence identity, or even 100% sequence identity, generally provides for the greatest inhibition; however, it is not required for inhibition. The RNAi method is able to tolerate sequence variations that might be expected due to genetic mutation, strain polymorphism, or evolutionary divergence. Alternatively, the duplex region of the RNA may be defined functionally as a nucleotide sequence that is capable of hybridizing with a portion of the target gene transcript. The length of the identical nucleotide sequences may be, for example, at least 25, 50, 100, 200, 300, or 400 bases.

[0176] The dsRNA construct may be synthesized either in vivo or in vitro. Endogenous RNA polymerase of the cell may mediate transcription in vivo, or cloned RNA polymerase can be used for transcription in vivo or in vitro. For transcription from a transgene in vivo or an expression construct, a regulatory region (e.g., promoter, enhancer, silencer, splice donor and acceptor, polyadenylation) may be used to transcribe the dsRNA strand (or strands). Inhibition may be targeted by specific transcription in an organ, tissue, or cell type; stimulation of an environmental condition (e.g., infection, stress, temperature, chemical inducers); and/or engineering transcription at a developmental stage or age. The RNA strands may or may not be polyadenylated; the RNA strands may or may not be capable of being translated into a polypeptide by a cell's translational apparatus. The dsRNA construct may be chemically or enzymatically synthesized by manual or automated reactions. The dsRNA construct may be synthesized by a cellular RNA polymerase or a bacteriophage RNA polymerase (e.g., T3, T7, SP6). The use and production of an expression construct are known in the art [see, e.g., WO97/32016; U.S. Pat. Nos. 5,593,874, 5,698,425, 5,712,135, 5,789,214, and 5,804,693]. If synthesized chemically or by in vitro enzymatic synthesis, the RNA may be purified prior to introduction into the cell. For example, RNA can be purified from a mixture by extraction with a solvent or resin, precipitation, electrophoresis, chromatography or a combination thereof. Alternatively, the dsRNA construct may be used with no or a minimum of purification to avoid losses due to sample processing. The dsRNA construct may be dried for storage or dissolved in an aqueous solution. The solution may contain buffers or salts to promote annealing, and/or stabilization of the duplex strands.

[0177] RNAi can be used to alter gene expression in a cell derived from or contained in any organism. The organism may be a plant, animal, protozoan, bacterium, virus, or fungus. For example, such organisms include, but are not limited to Drosophila, trypanasomes, lanaria, hydra, zebrafish, Caenorhabditis elegans, mice, human and other mammals. The cell may be from, for example, the germ line or somatic, totipotent or pluripotent, dividing or non-dividing, parenchyma or epithelium, immortalized or transformed, a stem cell or a differentiated cell. The cell may be any individual cell of the early embryo, and may be a blastocyte, or, alternatively, it may be an oocyte [see, e.g., Fire et al. (1998) Nature 391:806; Clemens et al. (2000) Proc. Natl. Acad. Sci. U.S.A. 97:6499-6503; PCT International Application Publication Nos. WO01/36646, WO99/32619, WO01/68836, WO01/29058 and WO01/75164].

[0178] The dsRNA may be directly injected into the cell or may be introduced by bathing the cell in a solution containing RNA. Other methods for introducing dsRNA intracellularly include bombardment by particles covered by the RNA, for example gene gun technology in which the dsRNA is immobilized on gold particles and fired directly at the site, and electroporation of cell membranes in the presence of the RNA. Precise conditions for electroporation depend on the device used to produce the electro-shock and the dimensions of the chamber used to hold the cells. This method permits RNAi on a large scale. Any known gene therapy technique can also be used to administer the RNA. A viral construct packaged into a viral particle would accomplish both efficient introduction of an expression construct into the cell and transcription of RNA encoded by the expression construct. Other methods known in the art for introducing nucleic acids into cells may be used, such as lipid-mediated carrier transport, chemical-mediated transport, such as calcium phosphate, and the like. Thus, the RNA may be introduced along with components that perform one or more of the following activities: enhance RNA uptake by the cell, promote annealing of the duplex strands, stabilize the annealed strands, or otherwise increase inhibition of the target gene. A transgenic animal that expresses RNA from a recombinant construct may be produced by introducing the construct into a zygote, an embryonic stem cell, or another multipotent cell derived from the appropriate animal.

[0179] RNAi may also be perfomed on an organismal level. Mammalian cells can respond to extracellular dsRNA, and RNAi can act systemically; therefore a specific transport mechanism for dsRNA may exist [see, e.g., Asher et al. (1969) Nature 223:715-717; WO01/36646; WO01/68836]. Consequently, injection of dsRNA into one tissue can inhibit gene function in cells throughout the animal. Thus, dsRNA may be administered extracellularly into a cavity, interstitial space, into the circulation of a mammal, introduced orally, or may be introduced by bathing an organism in a solution containing RNA. Methods for oral introduction include direct mixing of the RNA with food of the organism, as well as engineered approaches in which a species that is used as food is engineered to express the RNA, then fed to the organism to be affected. For example, food bacteria, such as Lactococcus lactis, may be transformed to produce the dsRNA [see, e.g., WO97/17117, WO97/14806]. Methods of injection include injection into vascular or extravascular circulation, the blood or lymph systems and the cerebrospinal fluid are sites where the RNA may be injected.

[0180] Drosophila cells are particularly well-suited for RNAi-based alteration of gene expression. Many Drosophila cell lines have been established and can be biochemically characterized for use in studying various cellular processes. Drosophila cell lines that are known to respond to dsRNAs by ablating expression of the target protein include S2, KC, BG2-C6, and Shi cells. Many signal transduction pathways and other cellular processes have been highly conserved from Drosophila to mammals, making it possible to study complex biochemical problems in a genetically tractable model organism. Importantly, results obtained from the cell culture studies can be confirmed in the whole organism, because Drosophila is very amenable to RNAi analyses at the organismal level. The use of dsRNA in Drosophila cell culture to silence expression of specific genes is technically simple, efficacious, and highly reproducible. The dsRNAs are efficiently internalized by the cells, thereby circumventing the problems generated by variable transfection efficiencies. Also, the gene silencing effect can be sustained through many cell divisions.

[0181] Compared to antisense technology, RNAi has been reported to achieve greater than 95% reduction in gene product. This effect can be manifested over a period of 6-7 days, thus allowing for many data points and repetition of the assay over time (Caplen et al. Gene 252:95-105 (2000)).

[0182] b. Gene Knock Out or Deletion

[0183] Direct gene “knock-out” procedures may also be used to alter the expression of one or more genes in a cell. In these methods, homologous recombination between DNA in a cell and heterologous nucleic acid introduced into the cell results in elimination of a targeted gene from the genome or alteration of the gene such that it does not produce functional protein. Methods of designing nucleic acid constructs for use in targeted gene disruption or deletion are well known in the art [see, e.g., Capecchi (1989) Science 244:1288; Capecchi et al. Nature (1990) 344:105; Koller et al. (1990) Science 248:1227].

[0184] C. Gene Insertion

[0185] Transfection methods may be used to introduce one or more genes into a host cell. The nucleic acid(s) transferred into the host cell may encode a wild-type or altered protein or a domain, derivative, fragment or homolog thereof. Transfer of nucleic acid(s) into a host cell can be accomplished by a variety of procedures. Such procedures include, but are not limited to, direct uptake using calcium phosphate [CaPO₄; see, e.g., Wigler et al. (1979) Proc. Natl. Acad. Sci. U.S.A. 76:1373-1376], polyethylene glycol [PEG]-mediated DNA uptake, electroporation, lipofection [see, e.g., Strauss (1996) Meth. Mol. Biol. 54:307-327], microcell fusion [see, e.g., Lambert (1991) Proc. Natl. Acad. Sci. U.S.A. 88:5907-5911; U.S. Pat. No. 5,396,767, Sawford et al. (1987) Somatic Cell Mol. Genet. 13:279-284; Dhar et al. (1984) Somatic Cell Mol. Genet. 10:547-559; and McNeill-Killary et al. (1995) Meth. Enzymol. 254:133-152], lipid-mediated carrier systems [see, e.g., Teifel et al. (1995) Biotechniques 19:79-80; Albrecht et al. (1996) Ann. Hematol. 72:73-79; Holmen et al. (1995) In Vitro Cell Dev. Biol. Anim. 31:347-351; Remy et al. (1994) Bioconjug. Chem. 5:647-654; Le Bolch et al. (1995) Tetrahedron Lett. 3:6681-6684; Loeffler et al. (1993) Meth. Enzymol. 217:599-618], liposome-mediated delivery [see, e.g., Philip et al. (1993) J. Biol. Chem. 268:16087-16090 and Aksentijevich et al. (1996) Hum. Gen. Ther. 7:1111-1122], adenovirus infection [see, e.g., Ragot et al. (1993) Nature 361:647-650], retroviral transduction [see, e.g., Cochlovius et al. (1998) Cancer Immunol. Immunother. 46:61-66, Bunnell et al. (1995) Proc. Natl. Acad. Sci. U.S.A. 92:7739 and Finer et al. (1994) Blood 83:43], electroporation [see, e.g., Hughes et al. (1996) J. Biol. Chem. 271:5369-5377 and Cron et al. (1997) J. Immunol. Meth. 205:145-1501, particle bombardment [see, e.g., Yang et al. (1990) Proc. Natl. Acad. Sci. U.S.A. 87:9568-9572], direct local injection of the DNA (for in vivo transfer of DNA) [see, e.g., Wolff et al. (1990) Science 247:1465-1468; and Zhu et al. (1993) Science 261:209-211], antibody-based methods [Mannino and Gould-Fogerite (1988) Biotechniques 6:682-690], retroviruses [Roux et al. (1989) Proc. Natl. Acad. Sci. U.S.A. 86:9079-9083], and antifection [see, e.g., Hirsch et al. (1993) Transpl. Proc. 25:138-139 and Poncet et al. (1996) Gene Therapy 3:731-738].

[0186] The nucleic acid encoding a protein of interest can be operably linked to elements that facilitate expression of the nucleic acid in host cells. Such elements include promoters, enhancers and terminators that are functional in the recipient host cell and are known to those of skill in the art.

[0187] For transfer of nucleic acid encoding a protein of interest into cells, the nucleic acid may be contained within a vector. Any vector known in the art for transfer and expression of nucleic acids in cells may be used, including plasmids, cosmids and artificial chromosomes. For simultaneous co-transfection, more than one protein of interest may be contained on separate vectors or on the same vector in which they can be operably linked to elements that facilitate expression of the nucleic acids in host cells. Multiple sequences, such as an nucleic acids expressing multiple elements in a calcium flux pathway, contained on the same vector may be controlled either by a single promoter or by multiple promoters. In a specific embodiment, the promoter is not native to the gene(s) expressing the protien(s).

[0188] Any methods known to those of skill in the art for the insertion of DNA fragments into a vector may be used to construct expression vectors containing a protein coding sequence of interest and appropriate transcriptional/translational control signals and/or other protein coding sequences. These methods may include in vitro recombinant DNA and synthetic techniques and in vivo recombinants (genetic recombination).

[0189] 4. Determining Effects of Alteration of Gene Expression on Intracellular Calcium

[0190] Following or simultaneously with the alteration of gene expression in a cell, the cell is analyzed to evaluate the effect, if any, on intracellular calcium. Intracellular calcium may be evaluated in a number of ways, including any of the methods described herein or known in the art. For example, intracellular calcium can be evaluated by assessment of cytosolic or intracellular organelle (e.g., endoplasmic reticulum) calcium levels and/or fluxes or by assessment of movement into, out of or within the cell following reduction, alteration or elimination of the expression of one or more genes. Cells can be exposed to conditions (e.g., intracellular and/or extracellular calcium buffering, including use of calcium chelators, and exposure to agents that activate, inhibit or otherwise modulate various cation entry/flux processes) that facilitate assessment of intracellular calcium. In particular embodiments of the methods provided herein for identifying intracellular calcium-modulating proteins, the resting cytosolic calcium levels, store-operated calcium entry into the cell and/or intracellular organelle calcium levels, uptake or release are evaluated during and/or following alteration of gene expression in a cell. For example, calcium levels and/or calcium release from the endoplasmic reticulum can directly be assessed using mag-fura 2, endoplasmic reticulum-targeted aequorin or cameleons. One method for indirect assessment of calcium levels or release is monitoring intracellular calcium levels (for example using fluorescence-based methods) after exposing a cell to an agent that effects calcium release (actively, e.g., IP₃, or passively, e.g., thapsigargin) from the organelle in the absence of extracellular calcium.

[0191] Resting cytosolic calcium levels, intracellular organelle calcium levels and cation movement may be assessed using any of the methods described herein or known in the art (see, e.g., descriptions herein of calcium-sensitive indicator-based measurements, such as fluo-3, mag-fura 2 and ER-targeted aequorin, labelled calcium (such as ⁴⁵Ca²⁺)-based measurements, and electrophysiological measurements). Particular aspects of ion flux that may be assessed include, but are not limited to, a reduction (including elimination) or increase in the amount of ion flux, altered biophysical properties of the ion current, and altered sensitivities of the flux to activators or inhibitors of calcium flux processes, such as, for example, store-operated calcium entry.

[0192] A protein, such as an ion transport protein, that is involved in, participates in and/or provides for store-operated calcium entry, and/or nucleic acid encoding such a protein, can be identified by a cell in which reduction, alteration or elimination of the expression of a gene is accompanied by an alteration, e.g., reduction, elimination, increase or other modification of store-operated ion flux into the cell. A protein, for example, an ion transport protein, involved in maintenance of resting cytosolic calcium levels, and/or nucleic acid encoding such a protein, can be identified by a cell in which reduction, alteration or elimination of the expression of a gene is accompanied by an alteration, e.g., increase, decrease or other modification, of resting cytosolic calcium levels. A protein, for example an ion transport protein, involved in intracellular organelle calcium storage, uptake or release (and/or nucleic acid encoding such a protein) can be identified by a cell in which reduction, alteration or elimination of the expression of a gene is accompanied by an alteration, e.g., increase, decrease, reduction, elimination or other modification, of the calcium levels of an intracellular organelle or of movement of cations (or other charge carrier) into or out of an intracellular organelle.

[0193] 5. Methods of Screening for Candidate Intracellular Calcium-Modulating Proteins

[0194] In conducting the method for identifying an ion transport or other intracellular calcium-modulating protein and/or nucleic acid encoding such a protein, the gene or genes that is/are altered in expression may be preselected, specific genes or may be random. For example, in certain embodiments of the methods, such as methods utilizing antisense RNA or RNA interference, the RNA used in effecting the alteration in gene expression could be generated from a random collection of DNA sequences obtained from a cell of the type in which the alteration is being conducted.

[0195] Alternatively, particular genes may be targeted for alteration of expression. Because most cells contain a vast number of genes, it can be desirable to identify candidate genes encoding proteins that may modulate intracellular calcium, for example, proteins involved in maintenance of cytosolic calcium levels, proteins that are involved in, participate in and/or provide for store-operated calcium entry or proteins involved in intracellular organelle calcium storage, uptake or release for targeted alteration of gene expression. Provided herein are methods for screening for candidate proteins (and/or genes or nucleic acids encoding proteins) involved in intracellular calcium modulation. In a particular embodiment, the method involves screening for candidate store-operated calcium entry proteins and/or genes or nucleic acids encoding such proteins. The methods can be used in conjunction with the methods of identifying a protein (and/or nucleic acid encoding a protein) involved in modulating intracellular calcium. Thus, in particular embodiments of the methods for identifying intracellular calcium-modulating proteins provided herein, the method includes alteration of the expression of one or more genes separately and/or in combinations that have been selected as genes encoding candidate ion transport proteins, calcium-binding proteins, EF hand-containing proteins or P-loop containing proteins that may be involved in intracellular calcium modulation. In a particular method, the cell utilized is a Drosophila cell, such as, for example, an S2 cell.

[0196] One embodiment of the methods of screening for candidate intracellular calcium-modulating proteins includes a step of evaluating a protein (and/or an amino acid sequence encoded by a nucleic acid or gene) for the presence of one or more, or two or more, or three or more, or four or more, or five or more, or six or more domains, each of which has homology to an amino acid sequence characteristic of an amino acid sequence that extends through a cellular membrane (e.g., a transmembrane domain). Characteristic features of transmembrane domains, e.g., hydrophobicity and helical conformation, are described herein and known in the art. The extent of homology suitable for use in the screening method can depend on several factors (e.g., the number of candidates desired and whether other structural motifs, such as described herein, are to be considered for inclusion in selecting candidate proteins), and can be empirically determined. The proteins or encoded amino acid sequences may be screened only for the presence of sequences with homology to transmembrane domains or may be screened for the presence of such domains and for the presence of sequences with homology to one or more other motifs or domains. One method for identifying proteins with homology to transmembrane domains is by evaluating amino acid sequence of a protein for the presence of predicted transmembrane domains using the TMpred program (see, e.g., www.ch.embnet.org/software/TMpred_form.html which can be accessed via the ExPASy Molecular Biology Server (www.expasy.ch)). The TMpred program predicts membrane-spanning regions and their orientation through use of an algorithm generated by statistical analysis of naturally occurring transmembrane proteins (i.e., proteins contained in the TMbase database; see Hofman and Stoffel (1993) Biol. Chem. Hoppe-Seyler 374:166).

[0197] In a further embodiment of the methods for screening for candidate intracellular calcium-modulating proteins, a protein (and/or amino acid sequence encoded by a nucleic acid or gene) is evaluated for the presence of amino acid sequence(s) with homology to amino acid sequence characteristic of a protein that participates in the transport of calcium, such as a calcium channel. Characteristic features of such sequences, e.g., amphipathic segments, are described herein and known in the art. The proteins may be screened only for the presence of such domains or may be screened for the presence of such domains and for the presence of one, or more, or multiple, e.g., 6 or more, domains with homology to a transmembrane domain. In one method, the amino acid sequence characteristic of a protein that transports calcium can include an amino acid sequence characteristic of any one or more one of the following proteins and/or domains: ion channels, cation channels, and calcium or sodium pores. In a particular method, the screening comprises evaluating proteins for homology with amino acid sequences characteristic of a protein that participates in calcium transport and for the absence of one or both of the following amino acid sequences: EWKFAR and EXD(E)CR(K)GXYXXYE (wherein “X” represents any amino acid, and an amino acid residue in parentheses is an alternative to the residue immediately preceeding it). The amino acid sequence EWKFAR is a motif characteristic of transient receptor potential (trp) calcium channel proteins. The sequence of amino acids EXD(E)CR(K)GXYXXYE is a motif characteristic of a pore-forming region of calcium channels such as voltage-gated calcium channels. This sequence of amino acids [EXD(E)CR(K)GXYXXYE] is a motif characteristic of a pore-forming region of calcium channels such as voltage-gated calcium channels.

[0198] In another embodiment of the methods for screening for candidate intracellular calcium-modulating proteins, a protein (and/or an amino acid sequence encoded by a nucleic acid or gene) is evaluated for the presence of amino acid sequence with homology to an amino acid sequence characteristic of a calcium-binding motif. One such calcium binding motif is referred to as an EF-hand [see, e.g., Kretsinger (1997) Nat. Struct. Biol. 4:514-516; Ikura (1996) Trends Biochem. Sci. 21:14-17; Kawasaki et al. (1995) Protein Profile 2:297-490]. Characteristic features of EF-hand motifs include those described herein and known in the art. Typically, an EF-hand motif contains a loop of about 12 amino acid residues flanked on either side by an alpha helix of about 12 amino acid residues. Position 12 of the loop typically contains a Glu or Asp. EF-hands may undergo a conformational change upon binding calcium ions. Proteins may be screened only for homology with calcium-binding domains or may be screened for the homology to such domains and for the presence of one, or more, or multiple, e.g., 6 or more, domains with homology to transmembrane domains and/or for homology with an amino acid sequence characteristic of a protein that transports calcium, such as a calcium channel.

[0199] In another embodiment of the methods for screening for candidate intracellular calcium-modulating proteins, a protein (and/or an amino acid sequence encoded by a nucleic acid or gene) is evaluated for the presence of amino acid sequence(s) having homology to an amino acid sequence characteristic of a presenilin protein. Presenilins are polytopic transmembrane proteins containing about six to nine transmembrane domains and a large hydrophilic loop towards the C-terminal part of the protein. The encoded proteins may be screened only for homology to presenilin domains, e.g., the loop domain, or may be screened for homology to such domains and for homology to calcium-binding domains, one, or more, or multiple, e.g., 6 or more, transmembrane domains and/or an amino acid sequence characteristic of a protein that transports calcium, such as a calcium channel.

[0200] In particular embodiments of any of the methods for screening for candidate intracellular calcium-modulating proteins provided herein, the protein (or amino acid sequence encoded by a gene or nucleic acid) screened is from an insect, e.g., Drosophila or Anopheles, nematode, e.g., Caenorhabditis, yeast, fish, e.g., zebrafish and pufferfish, mammal, mouse, rat or human. In particular embodiments, the protein (or amino acid sequence encoded by a gene or nucleic acid) is from Drosophila

[0201] Proteins (and/or amino acid sequences encoded by genes or nucleic acids) that can be evaluated in the screening methods include those contained in protein and gene/nucleic acid databases, such as those generated in connection with genome-sequencing projects. Proteins and/or amino acid sequences encoded by genes/nucleic acids contained in the databases can be evaluated in accordance with the criteria set forth above in order to identify candidate proteins involved in intracellular calcium modulation. The evaluation can be performed, for example, through computer-assisted database searches. Such databases and search systems are known in the art. For example, a database of the Drosophila genome and system for searching genes and encoded proteins of the genome is referred to as the “FlyBase GadFly Genome.Annotation Database” Drosophila [see, e.g., www.fruitfly.org or hedgehog.lbl.gov]. Other databases include C. elegans, yeast, human, mouse, rat and others. Amino acid sequences characteristic of the selected criteria (including, for example, sequences characteristic of ion channels, cation channels, and calcium or sodium pores) are incorporated into the annotation and search tools of many protein and genomic databases. Computer-assisted proteome analysis programs have been established from many different genomes (see, e.g., www.ebi.ak.uk/proteome). Additionally, amino acid sequence pattern information is available and searchable through other databases, including InterPro [see www.ebi.ac.uk/interpro/] as well as SWISS-PROT, TrEMBL, PROSITE, PRINTS, Pfam and Prodom.

[0202] Provided herein is a method for identifying a protein involved in modulating intracellular calcium, comprising:

[0203] reducing, altering or eliminating expression of one or more genes in a cell; and

[0204] evaluating intracellular calcium in the cell, whereby one or more proteins involved in modulating intracellular calcium and/or one or more nucleic acids encoding one or more proteins involved in modulating intracellular calcium is identified in cells in which a reduction, alteration or elimination of gene expression is associated with an alteration in intracellular calcium in the cell. In this method, intracellular calcium may be evaluated in any of a number of ways, including, but not limited to, measurement of intracellular calcium levels and/or monitoring intracellular calcium level time courses.

[0205] Also provided herein is a method for identifying a protein involved in modulating intracellular calcium, comprising:

[0206] reducing, altering or eliminating expression of one or more genes in a cell; and

[0207] evaluating store-operated calcium entry into the cell, whereby one or more proteins involved in modulating intracellular calcium and/or one or more nucleic acids encoding one or more proteins involved in modulating intracellular calcium is identified in cells in which a reduction, alteration or elimination of gene expression is associated with a reduction, alteration or elimination of store-operated calcium entry in the cell; and wherein

[0208] prior to reduction, alteration or elimination of gene expression, the cell exhibits store-operated calcium entry.

[0209] Further provided herein is a method for identifying a protein involved in modulating intracellular calcium, comprising:

[0210] reducing, altering or eliminating expression of one or more genes in a cell; and

[0211] evaluating cytosolic calcium levels, whereby one or more proteins involved in modulating intracellular calcium and/or one or more nucleic acids encoding one or more proteins involved in modulating intracellular calcium is identified in cells in which a reduction, alteration or elimination of gene expression is associated with an alteration in cytosolic calcium levels.

[0212] Another method for identifying a protein involved in modulating intracellular calcium comprises:

[0213] reducing, altering or eliminating expression of one or more genes in a cell; and

[0214] determining intracellular calcium levels in the resulting cell after reduction of calcium levels in an intracellular calcium store, whereby one or more proteins involved in modulating intracellular calcium and/or one or more nucleic acids encoding one or more proteins involved in modulating intracellular calcium is identified in cells in which a reduction, alteration or elimination of gene expression is associated with a reduction, alteration or elimination of an increase in cytosolic calcium levels after reduction of calcium levels of intracellular calcium stores; wherein

[0215] prior to reduction, alteration or elimination of gene expression, the cell exhibits increases in cytosolic calcium levels after reduction of calcium levels of intracellular calcium stores.

[0216] Also provided is a method for identifying a protein involved in modulating intracellular calcium, comprising:

[0217] reducing, altering or eliminating expression of one or more genes in a cell; and

[0218] monitoring intracellular calcium level time courses of the resulting cell after reduction of calcium levels in an intracellular calcium store, whereby one or more proteins involved in modulating intracellular calcium and/or one or more nucleic acids encoding one or more proteins involved in modulating intracellular calcium is identified in cells in which a reduction, alteration or elimination of gene expression is associated with a reduction, alteration or elimination of the fluctuations in cytosolic calcium levels after reduction of calcium levels of intracellular calcium stores; wherein

[0219] prior to reduction, alteration or elimination of gene expression, the cell exhibits fluctuations in cytosolic calcium levels after reduction of calcium levels of intracellular calcium stores.

[0220] In particular embodiments of any of the above methods for identifying a protein involved in modulating intracellular calcium, the protein is an ion transport protein, calcium-binding protein, EF hand-containing protein and/or a presenilin loop-containing protein.

[0221] Further provided herein are any of the above methods wherein the cell is a Drosophila cell, such as, for example, an S2 cell.

[0222] Also provided herein are any of the above methods wherein the reduction, alteration or elimination of gene expression is achieved by introducing RNA into or generating RNA within the cell, wherein the RNA comprises a sequence of nucleotides complementary to or identical to at least a portion of a gene in the cell or an RNA transcript of a gene of the cell. The RNA may be double-stranded RNA.

[0223] Provided herein are any of the above methods, further comprising comparing the amino acid sequence of the identified protein or proteins to amino acid sequences of proteins of species different from the species from which the cell is obtained. In particular embodiments, the amino acid sequence of the identified protein or proteins is compared to mammalian protein amino acid sequences thereby identifying a mammalian protein involved in modulating intracellular calcium. The mammal may be human.

[0224] Provided herein are any of these methods, wherein the cell exhibits increases in intracellular calcium levels after contact with thapsigargin. Also provided are any of these methods, wherein the protein(s) identified as involved in intracellular calcium modulation is an ion transport protein.

[0225] Also provided herein are any of the above methods for identifying a protein involved in modulating intracellular calcium, wherein the one or more genes is (are) selected as targets for reduction, alteration or elimination of expression by a process comprising any one or more of the following steps:

[0226] (a) identifying one or more genes of the cell that encode(s) one or more proteins comprising six or more domains each of which comprises and/or has homology to an amino acid sequence characteristic of an amino acid sequence that extends through a cellular membrane;

[0227] (b) identifying one or more genes of the cell that encode(s) one or more proteins comprising one or more domains comprising and/or having homology to an amino acid sequence characteristic of a protein that transports a cation, such as, for example, calcium;

[0228] (c) identifying one or more genes of the cell that encode(s) one or more proteins comprising one or more domains containing and/or having homology to an amino acid sequence characteristic of a calcium-binding motif, e.g., an EF-hand; and

[0229] (d) identifying one or more genes of the cell that encode(s) one or more proteins comprising one or more domains containing and/or having homology to an amino acid sequence characteristic of a presenilin protein, e.g., a presenilin loop sequence.

[0230] In conducting this method, it is also possible to combine any of the above steps (a)-(d) by identifying genes according to one of the steps and then identifying from among those identified genes a subset of genes according to another of the steps. Thus, for example, the method may be conducted such that genes encoding proteins comprising one or more domains containing and/or having homology to an amino acid sequence characteristic of a protein that transports calcium are first identified and then, within that group of genes, a subset of genes is identified by evaluating those genes for encoded proteins that also comprise six or more domains each of which contains and/or has homology to an amino acid sequence characteristic of an amino acid sequence that extends through a cellular membrane. Similarly, the method may be conducted such that genes encoding proteins comprising one or more domains containing and/or having homology to an amino acid sequence characteristic of a protein that transports calcium are first identified and then, within that group of genes, a subset of genes is identified by evaluating those genes for encoded proteins that also comprise one or more domains containing and/or having homology to an amino acid sequence characteristic of a calcium-binding motif, and further, within that first subset of genes, a subset of genes is identified by evaluating the first subset of genes for encoded proteins that also comprise six or more domains each of which contains and/or has homology to an amino acid sequence characteristic of an amino acid sequence that extends through a cellular membrane. In another example, the method may be conducted such that genes encoding proteins comprising one or more domains containing and/or having homology to an amino acid sequence characteristic of a presenilin protein, e.g., a presenilin loop sequence, are first identified and then, within that group of genes, a subset of genes is identified by evaluating those genes for encoded proteins that also comprise six or more domains each of which contains and/or has homology to an amino acid sequence characteristic of an amino acid sequence that extends through a cellular membrane. In yet another example, the method may be conducted such that genes encoding proteins comprising one or more domains containing and/or having homology to an amino acid sequence characteristic of a calcium-binding motif, e.g., an EF-hand, are first identified and then, within that group of genes, a subset of genes is identified by evaluating those genes for encoded proteins that also comprise six or more domains each of which contains and/or has homology to an amino acid sequence characteristic of an amino acid sequence that extends through a cellular membrane.

[0231] F. Methods of Screening for or Identifying an Agent that Modulates Intracellular Calcium

[0232] Methods of screening for or identifying agents that modulate intracellular calcium are provided herein. The methods are based in directly or indirectly monitoring of the effect of test agents on intracellular calcium and/or ion movement. In particular embodiments, the methods involve monitoring of store-operated calcium entry, resting cytosolic calcium levels and/or calcium levels in (and/or ion flux into or out of) intracellular organelles, e.g., the endoplasmic reticulum. The effect(s) of test agents on intracellular calcium can be assessed in a variety of ways including, but not limited to, evaluation of calcium or other ion (particularly cation) levels, movement of calcium or other ion (particularly cation), fluctuations in calcium or other ion (particularly cation) levels, kinetics of calcium or other ion (particularly cation) fluxes and/or transport of calcium or other ion (particularly cation) through a membrane.

[0233] In one embodiment, the methods can be conducted using a particular test agent: one that binds to, interacts with and/or modulates interactions, activities, levels or any physical, structural or other property of a protein involved in modulating intracellular calcium. In this embodiment, the method includes monitoring the effects of such a particular test agent on intracellular calcium (and, in particular embodiments, the effects on store-operated calcium entry, intracellular organelle calcium storage, uptake or release and/or, resting cytosolic calcium levels).

[0234] In another embodiment, the methods can be performed by contacting any test agent with (1) one or more proteins involved in modulating intracellular calcium, e.g., an ion transport protein, and/or (2) a cell, or portion thereof, e.g., a membrane, containing one or more proteins involved in modulating intracellular calcium, such as an ion transport protein, and/or nucleic acid (e.g., a gene or coding sequence such as cDNA or RNA), or portion(s) thereof, encoding such proteins. The effect of the test agent on intracellular calcium (and, in particular embodiments, the effect on store-operated calcium entry, intracellular organelle calcium storage, uptake or release and/or, resting cytosolic calcium levels) is monitored or assessed. In this embodiment of the methods, the test agent can be any agent, and is not necessarily one that (or has been identified as one that) binds to, interacts with and/or modulates interactions, activities, levels or any physical, structural or other property of a protein involved in modulating intracellular calcium.

[0235] In particular embodiments of any of the methods of screening for or identifying an agent that modulates intracellular calcium provided herein, the protein involved in modulating intracellular calcium is a protein that is involved in, participates in and/or provides for store-operated calcium entry, maintenance of resting cytosolic calcium levels and/or calcium storage in, or movement of cations into or out of, an intracellular organelle, such as, for example, the endoplasmic reticulum. In particular embodiments, the protein involved in modulating intracellular calcium is an ion transport protein, such as, for example, an ion transport protein that is involved in, participates in and/or provides for store-operated calcium entry. In one embodiment, the protein involved in modulating intracellular calcium is a component of a store-operated calcium entry channel. The one or more proteins involved in modulating intracellular calcium (and/or nucleic acid, or portion(s) thereof, encoding one or more proteins involved in modulating intracellular calcium) may be contained in a cell or portion thereof, such as, for example, a cell membrane (e.g., plasma membrane or an intracellular membrane). The methods may be performed in particular embodiments under conditions that permit specific evaluation of store-operated ion flux or movement, resting cytosolic calcium levels and/or cation levels in, or movement into or out of, an intracellular organelle, such as, for example, the endoplasmic reticulum.

[0236] A protein involved in modulating intracellular calcium that is used in the methods can be a full-length or complete protein (e.g., a protein that contains the complete amino acid sequence encoded by a gene, cDNA or RNA or a complete amino acid sequence without sequences that are removed during processing of the protein, including removal of a signal sequence, such as may occur in transport of a protein to a particular cellular location, or processing to remove a pre- and/or pro-sequence of a protein) or a portion of a complete protein. In embodiments of the methods that involve assessing a functional activity of the protein, the protein used in the method can be a portion of a full-length protein that is associated with, or exhibits or is sufficient for producing the functional activity, e.g., an intracellular calcium-modulating activity. In embodiments of the methods that involve assessing a property of the protein that is not necessarily the intracellular calcium-modulating activity of the protein, the protein used in the method can be a portion of a full-length protein that is associated with the particular property being assessed, e.g., binding properties, and can be, for example, a particular domain of the protein. Similarly, when a nucleic acid, or portion(s) thereof, encoding a protein involved in modulating intracellular calcium is used in the methods, the nucleic acid can be a complete gene, e.g, including transcriptional regulatory sequences, a complete protein coding sequence, e.g., cDNA or RNA, or portion(s) of these.

[0237] 1. Proteins (and/or Nucleic Acids Encoding Proteins) involved in Modulating Intracellular Calcium

[0238] The methods provided herein for screening for or identifying agents that modulate intracellular calcium are related to proteins (and/or nucleic acids, or portions thereof, encoding proteins) that are involved in modulating intracellular calcium. Some embodiments of the methods involve monitoring the effect of a test agent that binds to, interacts with and/or in some way modulates such proteins. Other embodiments involve the actual use of such a protein in a step of the method. For example, in these embodiments, a test agent can be contacted with (1) one or more proteins involved in modulating intracellular calcium, e.g., an ion transport protein, and/or (2) a cell, or portion thereof, e.g., a membrane, containing one or more proteins involved in modulating intracellular calcium, such as an ion transport protein, and/or nucleic acid (e.g., a gene or coding sequence such as cDNA or RNA), or portion(s) thereof, encoding such proteins.

[0239] Proteins (or nucleic acids, or portion(s) thereof, encoding proteins) used in the methods of screening for or identifying agents that modulate intracellular calcium provided herein (or proteins on which the methods are based) include proteins that are (or encode proteins that are) homologous to a protein encoded by a Drosophila gene that, when altered in its expression in a Drosophila cell, results in altered store-operated calcium entry into the cell, altered basal or resting cytosolic calcium levels and/or altered calcium levels in (and/or ion flux into or out of) intracellular organelles, e.g., the endoplasmic. An “alteration” of store-operated flux into a cellentry or calcium movement into, within or out of an intracellular organelle (e.g., the endoplasmic reticulum) can be a complete or nearly complete elimination of the activity, a reduction of the activity, an alteration in properties or characteristics of the activity (e.g., current properties or sensitivities) or an increase in the activity, e.g., relative to the activity in a control cell (e.g., a Drosophila cell) that has not been altered in its store-operated entry activity or calcium movement or storage activity with respect to an intracellular organelle. An “alteration” in the calcium level within an intracellular organelle or an alteration of resting cytosolic calcium levels can be, for example, a reduction, depletion, elimination of, or increase in calcium levels, e.g., relative to the levels in a control cell (e.g., a Drosophila cell) that has not been altered in its intracellular organelle or basal cytosolic calcium levels. Similarly, an “alteration” in gene expression may be complete or nearly complete elimination of the expression of a gene, a reduction in the expression of a gene, an increase in the expression of a gene, or an alteration in the protein encoded by the gene (such as truncation or other alteration that effectively renders the protein nonfunctional or provides for aberrant functioning of the protein), e.g., relative to the expression of the gene in a cell that has not been altered in its expression of the gene.

[0240] In particular embodiments of the methods for screening for or identifying agents that modulate intracellular calcium, a protein homologous to a protein encoded by a Drosophila gene that, when altered in its expression in a Drosophila cell, results in altered store-operated calcium entry into the cell is at least about 20%, or at least about 25%, or at least about 30%, or least about 35%, or at least about 40%, or at least about 45%, or at least about 50%, or at least about 52%, or at least about 55%, or at least about 60%, or at least about 65%, or at least about 70%, or at least about 75%, or at least about 80%, or at least about 85%, or at least about 90%, or at least about 95% or more homologous to the protein encoded by the coding sequence of the Drosophila gene. The particular homology can depend on the particular protein, e.g., species, that is homologous to the Drosophila gene, the extent of the encoded Drosophila protein to which the particular protein is homologous, and can also depend on the particular Drosophila gene that, when altered in its expression in a Drosophila cell, results in altered store-operated calcium entry into the cell. In particular embodiments, the protein is at least 35% or more homologous to the protein encoded by the coding sequence of the Drosophila gene. Such exemplary proteins may be homologous to the specified Drosophila protein over at least about 25%, or at least about 30%, or at least about 35%, or at least about 40%, or at least about 45%, or at least about 50%, or at least about 54%, or least about 55%, or at least about 60%, or at least about 65%, or at least about 70%, or at least about 75%, or at least about 80%, or at least about 85%, or at least about 90%, or at least about 95% or more of the protein encoded by the coding sequence of the Drosophila gene. In particular embodiments, the protein is homologous to the Drosophila protein over at least about 40% or more of the protein encoded by the coding sequence of the Drosophila gene.

[0241] In a particular embodiment of the above methods for screening for or identifying agents that modulate intracellular calcium, the protein (and/or protein encoded by a nucleic acid or portion(s) thereof used in the method) involved in modulating intracellular calcium is at least about 35% homologous over at least about 40% of the protein encoded by the coding sequence of the Drosophila gene.

[0242] In particular embodiments of the methods of screening for or identifying agents that modulate intracellular calcium provided herein, the protein used in the methods (and/or protein encoded by a nucleic acid or portion(s) thereof used in the methods) is an ion transport protein. In one embodiment, the protein can be involved in and/or provide for the movement of calcium and may be relatively specific for calcium ion transport. In one embodiment, the protein is an ion transport protein that is involved in, participates in and/or provides for store-operated calcium entry into cells.

[0243] In one embodiment of the methods of screening for or identifying agents that modulate intracellular calcium provided herein, the protein(s) used in the method (or the protein encoded by the nucleic acid, or portion(s) thereof, used in the method) contains six or more transmembrane domains. In another embodiment, the protein(s) used in the method (or the protein encoded by the nucleic acid, or portion(s) thereof, used in the method) does not contain the following sequence of amino acids: EWKFAR (SEQ ID NO: 114). This sequence of amino acids (EWKFAR) is a motif characteristic of transient receptor potential (trp) calcium channel proteins. In another embodiment, protein(s) used in the method (or the protein encoded by the nucleic acid, or portion(s) thereof, used in the method) does not contain the following sequence of amino acids (wherein “X” represents any amino acid, and an amino acid residue in parentheses is an alternative to the residue immediately preceeding it): EXD(E)CR(K)GXYXXYE (SEQ ID NO: 1115). This sequence of amino acids [EXD(E)CR(K)GXYXXYE] is a motif characteristic of a pore-forming region of calcium channels such as voltage-gated calcium channels. In another embodiment, the protein(s) used in the method (or the protein encoded by the nucleic acid, or portion(s) thereof, used in the method) does not contain either of the above-mentioned amino acid sequences, i.e., EWKFAR or EXD(E)CR(K)GXYXXYE.

[0244] In a particular embodiment of the methods of screening for or identifying agents that modulate intracellular calcium provided herein, the protein used in the methods (and/or protein encoded by a nucleic acid or portion(s) thereof used in the methods) is involved in modulating intracellular calcium (and, in particular embodiments, is involved in, participates in and/or provides for store-operated calcium entry, intracellular organelle calcium storage, uptake or release and/or, maintenance of resting cytosolic calcium levels) and is homologous to a protein encoded by the coding sequence of Drosophila gene CG4536 (see SEQ ID NO: 1 for a nucleotide coding sequence and SEQ ID NO:2 for amino acid sequence) and/or the the protein encoded by the coding sequence of Drosophila gene CG5842 (see SEQ ID NO: 3 for a nucleotide coding sequence and SEQ ID NO: 4 for amino acid sequence). In a further embodiment, the protein used in the method is an ion transport protein.

[0245] In a particular embodiment of the methods of screening for or identifying agents that modulate intracellular calcium, a protein used in the method (or a protein encoded by nucleic acid, or portion(s) thereof, used in the method) is one that is involved in modulating intracellular calcium (and, in particular embodiments, is involved in, participates in and/or provides for store-operated calcium entry, intracellular organelle calcium storage, uptake or release and/or, maintenance of resting cytosolic calcium levels) and that has an amino acid sequence that is at least about 20% or at least about 25% or at least about 30% or at least about 35% or at least about 40% or at least about 45% or at least about 46% or at least about 47%, or at least about 48%, or at least about 49%, or at least about 50%, or least about 52%, or at least about 55%, or at least about 60%, or at least about 65%, or at least about 70%, or at least about 75%, or at least about 80%, or at least about 85%, or at least about 90%, or at least about 95% or more homologous to an amino acid sequence of the protein encoded by the coding sequence of Drosophila gene CG4536 (e.g., Genbank Accession No. AAF46203; gi7290757 or SEQ ID NO: 2) or gene CG5842 (e.g., Genbank Accession No. AAF49752; gi7294406 or SEQ ID NO: 4). The particular homology can depend on the particular protein, e.g., species, that is homologous to a protein encoded by Drosophila gene CG4536 and/or CG5842 and the extent of the protein encoded by the Drosophila genes to which the particular protein is homologous. In particular embodiments, the protein is at least about 35%, or at least about 43% or at least about 44%, or at least about 45%, or at least about 46%, or at least about 47%, or at least about 48% or at least about 50% homologous to one or both of the proteins encoded by Drosophila genes CG4536 and CG5842. Such exemplary proteins may be homologous to the specified Drosophila proteins over at least about 25%, or at least about 27%, or at least about 30%, or at least about 35%, or at least about 40%, or at least about 43%, or at least about 45%, or at least about 50%, or at least about 51%, or at least about 52%, or at least about 53%, or at least about 54% or at least about 55%, or at least about 60%, or at least about 65%, or at least about 70%, or at least about 75%, or at least about 80%, or at least about 85%, or at least about 90%, or at least about 95% or more of the protein encoded by the coding sequence of Drosophila gene CG4536 (e.g., Genbank Accession No. AAF46203; gi7290757 or SEQ ID NO: 2) and/or CG5842 (Genbank Accession No. AAF49752; gi7294406 or SEQ ID NO: 4). In particular embodiments, the protein is homologous to the Drosophila protein over at least about 25%, or at least about 40%, or at least about 43%, or at least about 45%, or at least about 50%, or at least about 51%, or at least about 52% or more of the protein encoded by the coding sequence of Drosophila gene CG4536 and/or CG5842.

[0246] In a particular embodiment of the methods of screening for or identifying agents that modulate intracellular calcium, a protein used in the method (or proteins encoded by nucleic acids, or portion(s) thereof, used in the method) is one that is involved in modulating intracellular calcium (and, in particular embodiments, is involved in, participates in and/or provides for store-operated calcium entry, intracellular organelle calcium storage, uptake or release and/or, maintenance of resting cytosolic calcium levels) and that has an amino acid sequence that is at least about 35% homologous over at least about 40% of the protein encoded by the coding sequence of Drosophila gene CG4536 (and/or CG5842), or at least about 35% homologous over at least about 50% or 51% or 52% of the protein encoded by the coding sequence of Drosophila gene CG4536 (and/or CG5842), or at least about 41% homologous over at least about 50% or 51% or 52% of the protein encoded by the coding sequence of Drosophila gene CG4536 (and/or CG5842).

[0247] Proteins homologous to a protein encoded by the coding sequence of Drosophila gene CG4536 and/or CG5842 include, but are not limited to: calcium transport protein 1 (CaT1), epithelial calcium channel (ECaC;, including proteins referred to as CaT2 proteins), olfactory channels, stretch-activated channel proteins, vanilloid receptor-related osmotically activated channel proteins, vanilloid receptor type 1-like proteins, vanilloid receptor subtype 1 proteins, vanilloid receptor 1 proteins, vanilloid receptor-like proteins, capsaicin receptor proteins, OTRPC4 proteins, growth factor-regulated calcium channel proteins, transient receptor potential protein 12 (trp12), transient receptor potential protein V3 (TRPV3) and stretch-inhibitable nonselective channel (SIC) proteins.

[0248] Calcium Transport 1 (CaT1) Proteins

[0249] In a particular embodiment of the methods of screening for or identifying agents that modulate intracellular calcium, the protein used in the method (or proteins encoded by nucleic acids, or portion(s) thereof, used in the method) is a Calcium Transport Protein 1 (CaT1). CaT1 proteins are ion transport proteins that selectively transport calcium and display the predicted six-transmembrane domain architecture characteristic of a channel-forming protein [see, e.g., Peng et al. (1999) J. Biol. Chem. 274:22739-22746; Peng et al. (2000) Biochem. Biophys. Res. Commun. 278:326-332]. CaT1 proteins participate in transepithelial calcium transport and can mediate cellular calcium uptake as part of the transcellular pathway of calcium transport in intestine, kidney and placenta. In this respect, CaT1 channels can function as facilitated transporters that enable calcium to move down its electrochemical gradient from the external medium to the internal medium of renal and intestinal cells. Other tissues in which CaT1 is expressed include prostate, pancreas, salivary gland, liver and testis.

[0250] Exemplary CaT1 proteins include the following: a Homo sapiens calcium transport protein CaT1 (GenBank accession no. AAG41951 (SEQ ID NO: 6; see also SEQ ID NO: 5 for nucleic acid encoding the protein); having 27% identity and 45% homology over 52% of the Drosophila gene CG4536 protein); a Homo sapiens Cat-like B protein (GenBank accession no. CAC20417 (SEQ ID NO: 8; see also SEQ ID NO: 7 for nucleic acid encoding the protein); having 27% identity and 45% homology over 52% of the Drosophila gene CG4536 protein); a Homo sapiens Cat-like A protein (GenBank accession no. CAC20416 (SEQ ID NO: 10; see also SEQ ID NO: 9 for nucleic acid encoding the protein); having 27% identity and 44% homology over 52% of the Drosophila gene CG4536 protein); a Rattus norvegicus calcium transporter CaT1 protein (GenBank accession no. AAD47636 (SEQ ID NO: 12; see also SEQ ID NO: 11 for nucleic acid encoding the protein); having 26% identity and 44% homology over 51% of the Drosophila gene CG4536 protein); a Mus musculus calcium transporting protein homolog (GenBank accession no. BAA99538 (SEQ ID NO: 14; see also SEQ ID NO: 13 for nucleic acid encoding the protein); having 24% identity and 41% homology over 51% of the Drosophila gene CG4536 protein); a Homo sapiens calcium transport protein CaT1 (GenBank accession no. AAL40230 (SEQ ID NO: 16; see also SEQ ID NO: 15 for nucleic acid encoding the protein); having 27% identity and 45% homology over 52% of the Drosophila gene CG4536 protein); a Mus musculus protein similar to epithelial apical membrane calcium transporter/channel CaT1 (GenBank accession no. AAH16101 (SEQ ID NO: 18; see also SEQ ID NO: 17 for nucleic acid encoding the protein); having 27% identity and 44% homology over 51% of the Drosophila gene CG4536 protein); and the like. Particular CaT1 proteins that may be used in the methods provided herein include, but are not limited to, CaT1 proteins that are substantially homologous (including, e.g., at least about 98%, 95%, 90%, 85% or 80% homologous) to the above-listed proteins.

[0251] Epithelial Calcium Channel Proteins

[0252] Epithelial calcium channel (ECaC) proteins (also referred to as CaT2 proteins) are ion transport proteins that facilitate transepithelial calcium transport and apical calcium uptake in intestine and kidney. These proteins are also thought to participate in calcium entry into the cells of the distal convoluted tubule and connecting segment of the nephron. They also possess a high sensitivity to Cd²⁺ (see, e.g., Peng et al., (2000) J. Biol. Chem., 275(36):28186-28194; Muller et al., (2000) Genomics, 67:48-53). Other tissues in which ECaC is expressed include placenta, pancreas, brain, adrenal gland, heart, skeletal muscle, liver, lung, spleen, thymus, and testis.

[0253] Exemplary ECaC proteins include the following: a Oryctolagus cuniculus epithelial calcium channel (GenBank accession no. CAB40138 (SEQ ID NO: 20; see also SEQ ID NO: 19 for nucleic acid encoding the protein); having 25% identity and 44% homology over 51% of the Drosophila gene CG4536 protein); a Rattus norvegicus epithelial calcium channel (GenBank accession no. BAA99541 (SEQ ID NO: 22; see also SEQ ID NO: 21 for nucleic acid encoding the protein); having 26% identity and 43% homology over 51% of the Drosophila gene CG4536 protein); a Homo sapiens epithelial calcium channel (GenBank accession no. CAB96365 (SEQ ID NO: 24; see also SEQ ID NO: 23 for nucleic acid encoding the protein); having 25% identity and 42% homology over 51% of the Drosophila gene CG4536 protein); a Rattus norvegicus calcium transporter CaT2 protein (GenBank accession no. AAF86309 (SEQ ID NO: 26; see also SEQ ID NO: 25 for nucleic acid encoding the protein); having 26% identity and 43% homology over 51% of the Drosophila gene CG4536 protein); a Homo sapiens protein with similarity to calcium transport protein CaT2 (GenBank accession no. XP 005003 (SEQ ID NO: 28 see also SEQ ID NO: 27 for nucleic acid encoding the protein); having 25% identity and 43% homology over 42% of the Drosophila gene CG4536 protein); a Homo sapiens calcium transport protein CaT2 (GenBank accession no. AAL04015 (SEQ ID NO: 30 see also SEQ ID NO: 29 for nucleic acid encoding the protein); having 25% identity and 43% homology over 51% of the Drosophila gene CG4536 protein); and the like. Particular ECaC proteins that may be used in the methods provided herein include, but are not limited to, ECaC proteins that are substantially homologous (including, e.g., at least about 98%, 95%, 90%, 85% or 80% homologous) to the above-listed proteins.

[0254] Olfactory Channel Proteins

[0255] Olfactory channel proteins display the predicted six-transmembrane domain architecture characteristic of a channel-forming protein. These proteins are expressed in sensory neurons that mediate chemosensory, osmosensory, and mechanosensory functions (Colbert et al. (1997) J. Neurosci. 17(21):8259-69). An exemplary olfactory channel protein includes, but is not limited to the olfactory channel of C. elegans (GenBank accession no. AAB87064 (SEQ ID NO: 32; see also SEQ ID NO: 31 for nucleic acid encoding the protein); having 42% identity and 61% homology over 65% of Drosophila gene CG4536 protein). Particular Olfactory channel proteins that may be used in the methods provided herein include, but are not limited to, olfactory proteins that are substantially homologous (including, e.g., at least about 98%, 95%, 90%, 85% or 80% homologous) to the above-listed protein.

[0256] Stretch-Activated Channel Proteins

[0257] Stretch-activated channel (SAC) proteins or mechanosensitive channels (MSC) proteins are expressed in a wide variety of cell types (kidney, heart, etc.) and have been implicated in diverse functions. Some of which include osmoregulation and mechanoreception or mechanotransduction (membrane tension or deformation leads to channel activity). Stretch-activated cation channels have been suggested to act as endothelial mechanosensors for hemodynamic forces.[see Brakemeier et al. (2002) Cardiovas. Res. 53:209-218]. An exemplary SAC protein includes, but is not limited to the the stretch-activated channel 2B protein of Rattus norvegicus (GenBank accession no. BAA88637 (SEQ ID NO: 34; see also SEQ ID NO: 33 for nucleic acid encoding the protein); having 25% identity and 40% homology over 52% of the Drosophila gene CG4536 protein). Particular SAC proteins that may be used in the methods provided herein include, but are not limited to, SAC proteins that are substantially homologous (including, e.g., at least about 98%, 95%, 90%, 85% or 80% homologous) to the above-listed protein.

[0258] Vanilloid Receptor-Related Proteins

[0259] Vanilloid receptor-related proteins (e.g., vanilloid receptor-related osmotically activated channel proteins; vanilloid receptor type 1-like proteins; vanilloid receptor subtype 1 proteins; vanilloid receptor 1 proteins; vanilloid receptor-like proteins; transient receptor potential protein 12 (trp12) proteins; OTRPC4 proteins; capsaicin receptors; and the like) are are known to be expressed by sensory neurons. Once activated, these neurons evoke the sensation of burning pain and stimulate the release of neuropeptides that induce neurogenic inflammation. VR1 immunoreactivity is greatly increased in colonic nerve fibres of patients with active inflammatory bowel disease (Yiangou et al (2001) Lancet (North American Edition) 357: 1338-1339). VR1 receptors have also been shown to play a role in airway inflammation (Veronesi et al. (2000) Toxicology and Applied Pharmacology 169: 66-76) and may, thus, be important in the treatment of chronic obstructive pulmonary disease.

[0260] The cloned capsaicin receptor (also referred to as vanilloid receptor 1, VR1) reportedly is activated by increases in temperature in the noxious range, suggesting that it functions as a transducer of painful thermal stimuli in vivo. Because a vanilloid moiety constitutes an essential chemical component of capsaicin and resiniferatoxin structures, the proposed site of action of these compounds is generally referred to as the vanilloid receptor. Accordingly, Caterina et al. [(1997) Nature 389:816-824] named their cloned cDNA VR1, for “vanilloid receptor subtype 1.” An expressed sequence tag (EST) database search revealed several human clones with a high degree of similarity to VR1 at both the DNA and predicted amino acid sequence levels. VR1 and native VRs are nonselective cation channels reportedly directly activated by harmful heat, extracellular protons, and vanilloid compounds. VR1 is also expressed in nonsensory tissue and may mediate inflammatory rather than acute thermal pain. Premkumar and Ahern [(2000) Nature 408:985-990] showed that activation of PKC-epsilon induces VR1 channel activity at room temperature in the absence of any other agonist. They also observed this effect in native VRs from sensory neurons, and phorbol esters induced a vanilloid-sensitive calcium rise in these cells. The proinflammatory peptide bradykinin, and the putative endogenous ligand anandamide, induced and enhanced VR activity, respectively, in a PKC-dependent manner.

[0261] Exemplary vanilloid receptor-related proteins include the following:

[0262] the vanilloid receptor-related osmotically activated channel protein of Gallus gallus (Genbank accession no. AAG28026 (SEQ ID NO: 36; see also SEQ ID NO: 35 for nucleic acid encoding the protein); having 24% identity and 42% homology over 54% of the Drosophila gene CG4536 protein);

[0263] the vanilloid receptor type 1 like protein 1 of Rattus norvegicus (Genbank accession no. BAA94307 (SEQ ID NO: 38; see also SEQ ID NO: 37 for nucleic acid encoding the protein); having 24% identity and 39% homology over 57% of the Drosophila gene CG4536 protein);

[0264] the vanilloid receptor subtype 1 of Rattus norvegicus (GenBank accession no. AAC53398 (SEQ ID NO: 40; see also SEQ ID NO: 39 for nucleic acid encoding the protein); having 24% identity and 39% homology over 57% of the Drosophila gene CG4536 protein);

[0265] the vanilloid receptor 1 of Homo sapiens (GenBank accession no. CAB95729 (SEQ ID NO: 42; see also SEQ ID NO: 41 for nucleic acid encoding the protein); having 24% identity and 40% homology over 57% of the Drosophila gene CG4536 protein);

[0266] the vanilloid receptor-like protein 1 of Homo sapiens (GenBank accession no. XP_{—}054949 (SEQ ID NO: 44; see also SEQ ID NO: 43 for nucleic acid encoding the protein); having 24% identity and 39% homology over 50% of the Drosophila gene CG4536 protein);

[0267] the vanilloid receptor-like protein 1 of Rattus norvegicus (GenBank accession no. AAD26364 (SEQ ID NO: 46; see also SEQ ID NO: 45 for nucleic acid encoding the protein); having 25% identity and 40% homology over 52% of the Drosophila gene CG4536 protein);

[0268] the vanilloid receptor subtype 1 of Homo sapiens (GenBank accession no. XP 008512 (SEQ ID NO: 48; see also SEQ ID NO: 47 for nucleic acid encoding the protein); having 23% identity and 39% homology over 57% of the Drosophila gene CG4536 protein); the vanilloid receptor 1 of Homo sapiens (GenBank accession no.

[0269] CAB89866 (SEQ ID NO: 50; see also SEQ ID NO: 49 for nucleic acid encoding the protein); having 24% identity and 40% homology over 57% of the Drosophila gene CG4536 protein);

[0270] the vanilloid receptor-like protein 1 of Mus musculus (GenBank accession no. AAH05415 (SEQ ID NO: 52; see also SEQ ID NO: 51 for nucleic acid encoding the protein); having 25% identity and 40% homology over 50% of the Drosophila gene CG4536 protein);

[0271] a protein of Homo sapiens similar to vanilloid receptor-related osmotically activated channel (GenBank accession no. XP_{—}027181 (SEQ ID NO: 54; see also SEQ ID NO: 53 for nucleic acid encoding the protein); having 24% identity and 42% homology over 54% of the Drosophila gene CG4536 protein);

[0272] the vanilloid receptor-like protein 2 of Homo sapiens (GenBank accession no. AAK69487 (SEQ ID NO: 56; see also SEQ ID NO: 55 for nucleic acid encoding the protein); having 24% identity and 42% homology over 52% of the Drosophila gene CG4536 protein);

[0273] the vanilloid receptor-like channel 2 protein of Homo sapiens (GenBank accession no. BAB69040 (SEQ ID NO: 58; see also SEQ ID NO: 57 for nucleic acid encoding the protein); having 24% identity and 42% homology over 52% of the Drosophila gene CG4536 protein);

[0274] the vanilloid receptor-related osmotically activated channel of Homo sapiens (GenBank accession No. AAG28029 (SEQ ID NO: 60; see also SEQ ID NO: 59 for nucleic acid encoding the protein); having 24% identity and 42% homology over 54% of the Drosophila gene CG4536 protein);

[0275] the vanilloid receptor-like protein 2 of Mus musculus (GenBank accession no. AAK69486 (SEQ ID NO: 62; see also SEQ ID NO: 61 for nucleic acid encoding the protein); having 24% identity and 41% homology over 52% of the Drosophila gene CG4536 protein);

[0276] the vanilloid receptor-related osmotically activated channel of Mus musculus (GenBank accession no. AAG28028 (SEQ ID NO: 64; see also SEQ ID NO: 63 for nucleic acid encoding the protein); having 24% identity and 41% homology over 52% of the Drosophila gene CG4536 protein);

[0277] the vanilloid receptor-related osmotically activated channel of Rattus norvegicus (GenBank accession No. AAG28027 (SEQ ID NO: 66; see also SEQ ID NO: 65 for nucleic acid encoding the protein); having 24% identity and 42% homology over 52% of the Drosophila gene CG4536 protein);

[0278] the vanilloid receptor-like protein 1 of Homo sapiens (GenBank accession No. AAD26363 (SEQ ID NO: 68; see also SEQ ID NO: 67 for nucleic acid encoding the protein); having 24% identity and 39% homology over 50% of the Drosophila gene CG4536 protein);

[0279] the vanilloid receptor-like protein of Homo sapiens (GenBank accession no. AAD41724 (SEQ ID NO: 70; see also SEQ ID NO: 69 for nucleic acid encoding the protein); having 24% identity and 39% homology over 50% of the Drosophila gene CG4536 protein);

[0280] the vanilloid receptor type 1 like protein 2 of Rattus norvegicus (GenBank accession no. BAA94306 (SEQ ID NO: 72; see also SEQ ID NO: 71 for nucleic acid encoding the protein); having 22% identity and 36% homology over 56% of the Drosophila gene CG4536 protein);

[0281] a protein of Homo sapiens described by Wiemann et al. [(2001) Genome Res. 11: 422-35], having a strong sequence similarity to rat capsaicin/vanilloid receptor subtype 1 (GenBank accession no. CAB66735 (SEQ ID NO: 74; see also SEQ ID NO: 73 for nucleic acid encoding the protein); having 23% identity and 39% homology over 57% of the Drosophila gene CG4536 protein);

[0282] the vanilloid receptor-related osmotically activated channel of Homo sapiens (GenBank accession no. XP 012261 (SEQ ID NO: 76; see also SEQ ID NO: 75 for nucleic acid encoding the protein); having 24% identity and 42% homology over 54% of the Drosophila gene CG4536 protein);

[0283] the OTRPC4 protein described by Strotmann et al. [(2000) Nature Cell Biol. 2: 695-702] (GenBank accession no. AAG16127 (SEQ ID NO: 78; see also SEQ ID NO: 77 for nucleic acid encoding the protein); having 24% identity and 42% homology over 52% of the Drosophila gene CG4536 protein);

[0284] the OTRPC4 cation channel of Mus musculus (GenBank accession no. AAG17543 (SEQ ID NO: 80; see also SEQ ID NO: 79 for nucleic acid encoding the protein); having 24% identity and 41% homology over 52% of the Drosophila gene CG4536 protein);

[0285] the capsaicin receptor of Homo sapiens (GenBank accession No. AAG43466 (SEQ ID NO: 82; see also SEQ ID NO: 81 for nucleic acid encoding the protein); having 23% identity and 39% homology over 57% of the Drosophila gene CG4536 protein);

[0286] the transient receptor potential protein 12 (trp 12) from the Mus musculus kidney (GenBank accession no. CAC20703 (SEQ ID NO: 84; see also SEQ ID NO: 83 for nucleic acid encoding the protein); having 24% identity and 41% homology over 52% of the Drosophila gene CG4536 protein); and the like. Particular vanilloid receptor-related proteins that may be used in the methods provided herein include, but are not limited to, vanilloid receptor-related proteins that are substantially homologous (including, e.g., at least about 98%, 95%, 90%, 85% or 80% homologous) to the above-listed proteins.

[0287] Growth Factor-Regulated Channel Proteins

[0288] Growth factor-regulated calcium (GRCs) channel proteins are calcium-permeable cation channels that are reportedly regulated by growth factors, such as insulin-like growth factor-I (IGF-I), and the like. These particular channels localize mainly to intracellular pools under basal conditions. Upon stimulation of cells by IGF-I, the GRC translocates to the plasma membrane. Thus, IGF-I augments calcium entry through GRCs by regulating trafficking of the channel. An exemplary Growth factor-regulated calcium channel protein includes, but is not limited to the growth factor regulated calcium channel of Mus musculus (GenBank accession No. BAA78478 (SEQ ID NO: 86; see also SEQ ID NO: 85 for nucleic acid encoding the protein); having 25% identity and 40% homology over 50% of the Drosophila gene CG4536 protein); and the like. Particular Growth factor-regulated calcium channel proteins that may be used in the methods provided herein include, but are not limited to, Growth factor-regulated calcium channel proteins that are substantially homologous (including, e.g., at least about 98%, 95%, 90%, 85% or 80% homologous) to the above-listed protein.

[0289] Stretch-Inhibitable Channel Proteins

[0290] Stretch-inhibitable nonselective channel (SIC) proteins are mechanosensitive and are homologs of the capsaicin receptor-nonselective cation channels. The SIC channel can be inactivated by membrane stretch. The mechanosensitive nonselective channels have been widely investigated and are considered to play important roles in the control of various cell functions, including cell volume regulation, smooth muscle contraction, and cardiac rhythm generation. There are two groups of mechanosensitive nonselective channels: stretch activated and stretch inactivated. Even though mechanosensitive nonselective channels pass only monovalent cations under physiological conditions, activation of them elicits membrane depolarization. Thus, mechanosensitive nonselective channels may alter membrane potential or transport cations in response to cell volume changes or stretching of the cell membrane. One known isoform of SIC encodes a 563-amino acid protein with putative six transmembrane segments (see Suzuki et al. (1999) J. Biol. Chem. 274:6330-6335). The cDNA was expressed in mammalian cells, and electophysiological studies were performed. SIC-induced large cation currents were found to be regulated by cell volume, with currents being stimulated by cell shrinkage and inhibited by cell swelling.

[0291] An exemplary SIC protein includes, but is not limited to the stretch-inhibitable nonselective channel (SIC) of Rattus norvegicus (GenBank accession No. BAA34942 (SEQ ID NO: 88; see also SEQ ID NO: 87 for nucleic acid encoding the protein); having 25% identity and 40% homology over 40% of the Drosophila gene CG4536 protein); and the like. Particular SIC proteins that may be used in the methods provided herein include, but are not limited to, SIC proteins that are substantially homologous (including, e.g., at least about 98%, 95%, 90%, 85% or 80% homologous) to the above-listed protein.

[0292] Transient Receptor Potential V3 (TRPV3) Proteins Transient Receptor Potential V3 (TRPV3 or VRL3) are thermosensitive channels expressed in skin cells (keratinocytes) [see, e.g., Peier et al. (2002) Science 296:2046-2049] and dorsal root ganglion, trigeminal ganglion, spinal cord and brain [see Xu et al. (2002) Nature 418:181-185; Smith et al. (2002) Nature 418:186-188]. Particular TRPV3 proteins that may be used in the methods provided herein include, but are not limited to, Homo sapiens TRPV3 cation channel (GenBank accession No.AAM54027 (SEQ ID NO: 107; see also SEQ ID NO: 106 for nucleic acid encoding the protein); having 25% identity and 41% homology over 49% of the Drosophila gene CG4536 protein); and Mus musculus TRPV3 ion channel (GenBank accession No.AAM33069 (SEQ ID NO: 109; see also SEQ ID NO: 108 for nucleic acid encoding the protein); having 26% identity and 42% homology over 49% of the Drosophila gene CG4536 protein). TRPV3 proteins that are substantially homologous (including, e.g., at least about 98%, 95%, 90%, 85% or 80% homologous) to the above-listed proteins may also be used in the methods.

[0293] Other proteins contemplated for use in the methods provided herein include: the C. elegans protein having similarity to Pfam domain: PF00023 (GenBank accession no. AAF60537 (SEQ ID NO: 90; see also SEQ ID NO: 89 for nucleic acid encoding the protein); having 29% identity and 48% homology over 63% of the Drosophila gene CG4536 protein); the C. elegans protein GenBank accession no. AAC04431 (SEQ ID NO: 92; see also SEQ ID NO: 91 for nucleic acid encoding the protein) having 25% identity and 43% homology over 77% of the Drosophila gene CG4536 protein; the C. elegans protein having similarity to Pfam domain: PF00023 (GenBank accession no. CAA98449 (SEQ ID NO: 94; see also SEQ ID NO: 93 for nucleic acid encoding the protein); having 26% identity and 43% homology over 66% of the Drosophila gene CG4536 protein); the Homo sapiens protein having similarity to human ankyrin (GenBank accession no. CAA96679 (SEQ ID NO: 96; see also SEQ ID NO: 95 for nucleic acid encoding the protein); having 29% identity and 46% homology over 40% of the Drosophila gene CG4536 protein); the Rattus norvegicus ion channel (GenBank accession no. BAA93435 (SEQ ID NO: 98; see also SEQ ID NO: 97 for nucleic acid encoding the protein); having 25% identity and 40% homology over 52% of the Drosophila gene CG4536 protein); Anopheles gambiae protein ebiP7471 (GenBank accession no. EAA06511 (SEQ ID NO: 111; see also SEQ ID NO: 110 for nucleic acid encoding the protein); having 61% identity and 70% homology over 100% of the Drosophila gene CG4536 protein); and Anopheles gambiae protein ebiP9093 (GenBank accession no. EAA00229 (SEQ ID NO: 113; see also SEQ ID NO: 112 for nucleic acid encoding the protein); having 30% identity and 47% homology over 63% of the Drosophila gene CG4536 protein). In other embodiments, other proteins that may be used in the methods provided herein include, but are not limited to, proteins that are substantially homologous (including, e.g., at least about 98%, 95%, 90%, 85% or 80% homologous) to the above-listed protein.

[0294] These listed proteins and their sequences exemplify proteins that are useful for methods, materials and systems of the invention. Naturally occurring and synthesized alternative forms of these proteins such as allelic forms, isoforms, muteins, and mutated derivatives will have sequence changes that do not abolish their operation in modulating intracellular calcium and are useful in embodiments. Many mutations and allelic forms of these proteins are known and are contemplated as embodiments. In yet another embodiment one or more of the proteins associates with a presenilin protein and forms a calcium channel that may be controlled through binding interactions with or mediated by the presenilin protein.

[0295] Proteins used in the methods for screening for or identifying an agent that modulates intracellular calcium include synthetic proteins, proteins endogenously expressed by a cell, and recombinant proteins that are isolated from a source containing the protein or that are expressed by a cell, virus or organism. Nucleic acids used in the methods include synthetic nucleic acids, recombinant nucleic acids and nucleic acids isolated from a source containing the nucleic acid.

[0296] 2. Test Agents

[0297] Generally, agents tested in the methods of screening for or identifying agents that modulate intracellular calcium provided herein can be of any physical type. Examples of agents include, but are not limited to, biomolecules, including, but not limited to, amino acids, peptides, polypeptides, peptiomimetics, nucleotides, nucleic acids (including DNA, cDNA, RNA, antisense RNA and any double- or single-stranded forms of nucleic acids and derivatives and structural analogs thereof), polynucleotides, saccharides, fatty acids, steroids, carbohydrates, lipids, lipoproteins and glycoproteins. Such biomolecules can be substantially purified, or can be present in a mixture, such as a cell extract or supernate. Test agents further include synthetic or natural chemical compounds, such as simple or complex organic molecules, metal-containing compounds and inorganic ions (including, for example, Gd³⁺, lead and lanthinum). Also included are pharmacological compounds, which optionally can be subjected to directed or random chemical modifications, such as acylation, alkylation, esterification, amidation, etc., to produce structural analogs.

[0298] Test agents suitable for use in the methods can optionally be contained in compound libraries. Methods for producing compound libraries by random or directed synthesis of a wide variety of organic compounds and biomolecules are known in the art, and include expression of randomized oligonucleotides and oligopeptides. Methods of producing natural compounds in the form of bacterial, fungal, plant and animal extracts are also known in the art. Additionally, synthetically produced or natural compounds and compound libraries can be readily modified through conventional chemical, physical and biochemical means to produce combinatorial libraries. Compound libraries are also available from commercial sources.

[0299] 3. Methods Based on Testing an Agent that Binds to, Interacts with and/or Modulates Interactions, Activities or Levels of a Protein Involved in Modulating Intracellular Calcium (and/or Nucleic Acid, or Portion(S) thereof, Encoding Such Proteins)

[0300] In one embodiment of the methods for screening for or identifying agents that modulate intracellular calcium provided herein, the test agent is one that binds to, interacts with and/or modulates interactions, activities, levels or any physical, structural or other property of a protein (e.g., an ion transport protein) involved in modulating intracellular calcium. Such particular test agents include agents that are known to (or that are identified as agents that can) bind to, interact with and/or modulate interactions, activities, levels or any physical, structural or other property of a protein involved in modulating intracellular calcium. Thus, this embodiment of the methods includes a step of assessing or monitoring the effects of such a test agent on intracellular calcium (and, in particular embodiments, the effects on store-operated calcium entry, intracellular organelle calcium storage, uptake or release and/or, resting cytosolic calcium levels).

[0301] The protein involved in modulating intracellular calcium that the test agent binds to, interacts with and/or modulates (e.g., the interactions, activities, levels or any physical, structural or other property of the protein) can be proteins as provided herein above. In particular embodiments, the protein is one that is involved in, participates in, and/or provides for store-operated calcium entry, maintenance of resting cytosolic calcium levels and/or calcium storage in, or movement of cations into or out of, an intracellular organelle or compartment (e.g., endoplasmic reticulum). In one embodiment of the methods, the effect of test agent on store-operated calcium entry is monitored.

[0302] a. Identification of Particular Test Agents

[0303] Test agents suitable for use in this embodiment of the methods for screening for or identifying agents that modulate intracellular calcium can be identified in a number of ways using methods described herein and/or known in the art.

[0304] Binding and Interaction Assays

[0305] A number of in vitro and cell-based binding assays are known in the art and can be modified as needed by one of skill in the art to identify agents that bind to or interact with a protein involved in modulating intracellular calcium. Test agents that bind to a protein involved in modulating intracellular calcium include molecules that physically interact with the protein with relatively high affinity and selectivity. For example, an agent that binds to a protein involved in modulating intracellular calcium can bind with a Kd of about 10⁻⁴ M or less, such as about 10⁻⁶ M or less, including about 10⁻⁸ M or about 10⁻⁹ M or less. In contrast, under the same conditions, the agent can bind a protein that is not the particular protein involved in modulating intracelluar calcium with an affinity that is at least 10-fold lower, such as at least 100-fold or 1000-fold lower.

[0306] In vitro methods for identifying molecules that bind to or interact with a protein involved in modulating intracellular calcium include both direct methods, e.g., in which binding between the agent and the polypeptide is measured, and competitive methods, in which the ability of an agent to displace binding between a bound molecule and the polypeptide is measured.

[0307] Exemplary in vitro methods include co-purification assays (e.g., GST pull-down assays, co-immunoprecipitation assay, chromatographic assays), phage display (see, e.g., Rodi et al. (2002) Curr. Opin. Chem. Biol. 6:92-96), ribozyme display (Hanes and Pluckthun (1997) Proc. Natl. Acad. Sci. U.S.A. 13:4937-4942), and protein arrays (Cahill (2001) J. Immunol. Meth. 250:81-91).

[0308] Detection of in vitro binding or interaction between an agent and a protein involved in modulating intracellular calcium can involve a variety of approaches, such as, for example, nuclear magnetic resonance (NMR) (Hadjuk et al. (1999) J. Med. Chem. 42:2315-2317), mass spectroscopy (Siegel (2002) Curr. Top. Med. Chem. 2:13-33), fluorescence spectroscopy (Winkler et al. (1999) Proc. Natl. Acad. Sci. U.S.A. 96:1375-01378), scintillation proximity assays (SPQ) (Fernandes (1998) Curr. Opin. Chem. Biol. 2:597-603), surface plasmon resonance assays (available commercially from BIACORE; http://www.biacore.se/proteomics/), and others. Many of these methods are amenable to high-throughput screening of test agents.

[0309] The protein involved in modulating intracellular calcium, the agent, or both, used in an in vitro binding or interaction assay can be in gas phase, in solution, in suspension, or attached to a solid support, as appropriate for the assay method. The protein, agent, or both can be detectably labeled. Methods for preparing the protein or test agent in a form suitable for the particular assay are known in the art.

[0310] Cell-based binding assays include, for example, yeast two-hybrid assays (see, e.g., U.S. Pat. Nos. 5,283,173, 5,468,614 and 5,667,973); bacterial two-hybrid assays (Juong (2001) J. Cell Biochem. Suppl. 37:53-57), and others. Such assays are particularly suitable for identifying polypeptides that interact with a protein involved in modulating intracellular calcium. Two-hybrid assays are based on the modular nature of most transcription factors, which consist of separable DNA-binding and activation domains. Briefly, such assays use two different DNA constructs, one that codes for the polypeptide of interest (i.e., a protein involved in modulating intracellular calcium or portion thereof) fused to a gene or nucleic acid encoding the DNA binding domain of a known transcription factor. In the other construct, a DNA sequence, from a library of sequences, that encodes a potential test agent polypeptide is fused to a gene or nucleic acid that codes for the activation domain of the known transcription factor. If the polypeptide of interest and the test polypeptide interact, the DNA-binding and activation domains are brought into close proximity, which allows transcription of a reporter gene that is operably linked to a transcriptional regulatory site responsive to the transcription factor. Expression of the reporter gene can be detected, and cell colonies containing the functional transcription factor isolated. From these colonies, the nucleic acid molecule encoding the test polypeptide that binds or interacts with the protein involved in intracellular calcium modulation can be isolated.

[0311] Another cell-based assay for identification of molecules that interact with a protein, such as a protein involved in modulating intracellular calcium, is the tandem affinity purification (TAP) method (see, e.g., Rigaut et al. (1999) Nature Biotech. 17:1030-1032; Puig et al. (2001) Methods 24:218-229). The method involves a two-step process for the affinity purification of protein complexes from cells, e.g., yeast, when expressed at relatively normal levels under native conditions. The method employs a tag that is fused to the protein of interest (e.g., a protein involved in modulating intracellular calcium) through recombinant expression of the fusion protein in order to facilitate affinity purification using two different selection molecules. The tag can be a fusion of protein A IgG-binding domains (for use in a first affinity purification by an IgG matrix) and a calmodulin-binding peptide (for use in a second affinity purification by calmodulin-coated beads) separated by a TEV protease cleavage site (to eluate protein complexes bound to the IgG matrix). Thus, the protein of interest is expressed in cells as a fusion with the tag and then extracts of the cells are mixed with the IgG matrix, bound complexes are eluted by cleavage with TEV protease, and the eluate is mixed with calmodulin-coated beads in the presence of calcium. The complexes are released from the beads with EGTA. The purified complex can be used for protein identification, functional or structural studies. Analytical methods that can be applied include analytical gel electrophoresis and mass spectrometry. The method can be used to identify a variety of interacting agents, including, for example, proteins, nucleic acids, lipids and peptides.

[0312] Assays that generally can be used for identifying test agents that modulate the binding or interaction of a protein of interest (e.g., a protein involved in intracellular calcium modulation) with other molecules are also known in the art. In these assays, a complex of the protein of interest and a binding/interaction partner is typically contacted with a potential test agent and the binding or interaction of the complex is assessed (for example, for an effect of the potential test agent on the binding, such as decreased, increased or other alterations in the interaction) using standard analytical techniques as described herein and known in the art.

[0313] Level and Activity Assays

[0314] A number of in vitro and cell-based assays are known in the art and can be modified as needed by one of skill in the art to identify agents that alter the level and/or activity of proteins. The assay used can depend on the protein of interest and its activities. Thus, for example, if the protein of interest is an ion transport protein, one method for assessing activity is the analysis of the electrophysiological properties of the channel activity using procedures described herein and known in the art. If the protein of interest has an enzymatic activity, then one method for assessing activity is the analysis of substrate interaction and reaction. For example, if the protein of interest has a protease activity, it typically can be assessed by analysis of substrate cleavage. Potential test agents that modulate an activity of a protein involved in intracellular calcium modulation can be identified by evaluating the effect of such an agent on the particular activity of the protein.

[0315] Potential test agents that modulate the levels of a protein involved in intracellular calcium modulation can be identified using a number of techniques known in the art. For example, potential agents that modulate the levels of expression of a protein can be identified in cell-based assays in which the level of the protein (either an endogenous protein or a recombinant or reporter protein) is assessed upon exposure of the cell to a potential test agent. Thus, for example, if the protein of interest is endogenously or recombinantly expressed in a cell using transcription regulatory sequences (e.g., promoters, enhancers) from the gene that encodes the protein, it is possible to identify test agents that modulate expression of the gene by evaluating protein levels of the cell. Alternatively, the transcription regulatory sequences of the gene can be operably linked to DNA encoding a readily measurable reporter protein and the levels of reporter protein measured as an indication of the effect of a potential test agent on expression levels of the protein of interest. Methods of measuring protein levels are well known in the art, including, for example, quantitative electrophoretic analyses and immunoassays, e.g., ELISA and other assays. The levels of the mRNA transcript of a protein of interest can also be determined upon exposure of a cell to a potential test agent to identify agents that modulate expression of the protein. Methods of evaluating mRNA levels are also well known in the art, including, for example, northern blots and RT-PCR.

[0316] b. Monitoring The effects of Test Agent on Intracellular Calcium

[0317] In this embodiment of the methods of screening for or identifying an agent that modulates intracellular calcium, the effects of a test agent (which is one that binds to, interacts with and/or modulates interactions, activities, levels or any physical, structural or other property of a protein involved in modulating intracellular) on intracellular calcium are monitored. A test agent is identified as an agent that modulates intracellular calcium if it has an effect on intracellular calcium. In particular embodiments, the effect of test agent on store-operated calcium entry, intracellular organelle (e.g., endoplasmic reticulum or other intracellular compartment) calcium storage, uptake or release and/or, resting cytosolic calcium levels is monitored or assessed.

[0318] Generally, in monitoring the effect of a test agent on intracellular calcium in any of the screening/identification methods provided herein, including this particular embodiment, some direct or indirect evaluation or measurement of cellular (including cytosolic and intracellular organelle or compartment) calcium and/or movement of ions into, within or out of a cell, organelle, or portions thereof (e.g., a membrane) is conducted. A variety of methods are described herein and/or known in the art for evaluating calcium levels and ion movements or flux. The particular method used and the conditions employed can depend on whether a particular aspect of intracellular calcium is being monitored. For example, as described herein, reagents and conditions are known, and can be used, for specifically evaluating store-operated calcium entry, resting cytosolic calcium levels and calcium levels and uptake by or release from intracellular organelles. The effect of test agent on intracellular calcium can be monitored using, for example, a cell, an intracellular organelle or storage compartment, a membrane (including, e.g., a detached membrane patch or a lipid bilayer) or a cell-free assay system.

[0319] In a particular embodiment of these methods, the effect of test agent on intracellular calcium is monitored using a cell. The cell can be one that contains the particular protein involved in intracellular calcium modulation that the test agent binds to, interacts with, and/or modulates the interactions, activities, levels or any physical, structural or other property of. Alternatively, the cell may not contain the particular protein involved in intracellular calcium modulation. In one embodiment the cell used in the method is a cell that exhibits store-operated calcium entry, and the effects of the test agent on store-operated calcium entry are monitored or assessed. 1

[0320] 4. Methods Based on Testing the Effect of Any Test Agent on Intracellular Calcium

[0321] In another embodiment of the methods for screening for or identifying agents that modulate intracellular calcium provided herein, the effect of any test agent on intracellular calcium (and, in particular embodiments, the effect on store-operated calcium entry, intracellular organelle calcium storage, uptake or release and/or, resting cytosolic calcium levels) is monitored, assessed or evaluated. In this embodiment of the methods, the test agent can be any agent, and is not necessarily one that (or has been identified as one that) binds to, interacts with and/or modulates interactions, activities, levels or any physical, structural or other property of a protein involved in modulating intracellular calcium. Generally, in this embodiment, the method can be performed by contacting any test agent with (1) one or more proteins involved in modulating intracellular calcium, e.g., an ion transport protein, and/or (2) a cell, or portion thereof, e.g., a membrane, containing one or more proteins involved in modulating intracellular calcium, such as an ion transport protein, and/or nucleic acid (e.g., a gene or coding sequence such as cDNA or RNA), or portion(s) thereof, encoding such proteins. The one or more proteins involved in modulating intracellular calcium that are used in these methods can be proteins as provided herein above. In particular embodiments, the one or more proteins is (are) one that is involved in, participates in, and/or provides for store-operated calcium entry, maintenance of resting cytosolic calcium levels and/or calcium storage in, or movement of cations into or out of, an intracellular organelle or compartment (e.g., endoplasmic reticulum). In one embodiment of the methods, the effect of test agent on store-operated calcium entry is monitored.

[0322] The monitoring, evaluation or assessment of intracellular calcium in these embodiments of the methods can be conducted in a variety of ways which can be used for all embodiments of the screening/identification methods as described herein. The monitoring typically involves some direct or indirect evaluation or measurement of cellular (including cytosolic and intracellular organelle or compartment) calcium and/or movement of ions into, within or out of a cell, organelle, or portions thereof (e.g., a membrane) is conducted. A number of methods are described herein and/or known in the art for evaluating calcium levels and ion movements or flux.

[0323] 5. Cells

[0324] Any cell that can be evaluated for intracellular calcium may be used in the methods provided herein. In a particular embodiment, the cell is one in which store-operated calcium entry occurs or that can be manipulated such that store-operated calcium entry occurs in the cell. In particular embodiments, the cell contains one or more proteins involved in modulating intracellular calcium (and, in particular, is involved in, participates in and/or provides for store-operated calcium entry, intracellular organelle calcium storage, uptake or release and/or, maintenance of resting cytosolic calcium levels), such as those provided herein. The cell may endogenously express the protein(s) or recombinantly express the protein(s) through introduction of heterologous nucleic acid encoding the protein(s) into the cell using methods known in the art and described herein. In particular embodiments, the cell is a recombinant cell that expresses the protein(s) as heterologous protein(s). Such cells may overexpress the heterologous protein(s). For example, a recombinant cell may be one that endogenously expresses the protein(s) and in also has been transfected with additional copies of nucleic acid encoding the protein(s). In a particular example, the host cell used in the generating the recombinant cell may be one that endogenously expresses little to no store-operated calcium entry activity (e.g., CHO-K1 cells which do not exhibit a current with biophysical properties characteristic of a store-operated calcium entry current), or a host cell in which endogenous store-operated calcium entry activity has been eliminated (e.g., through gene knock-out or silencing, such as RNA interference, methods or by inhibition with an agent that does not inhibit store-operated calcium entry activity of the heterologous protein(s)).

[0325] Cells or less differentiated precursor cells having an endogenous protein involved in modulating intracellular calcium can be used. Cells or less differentiated precursor cells may be recombinant cells stably or transiently transfected with intracellular calcium-modulating protein(s) in vitro or in an organism. In vitro transfection is followed by cell expansion through culturing prior to use.

[0326] Cells for use in the methods may be of any species. In one embodiment, the cells can be eukaryotic cells. In a particular embodiment, the cells can be yeast, insect (e.g., Drosophila or Anopheles), or mammalian cells. Mammalian cells include, but are not limited to, rodent (e.g., mouse, rat and hamster), primate, monkey, dog, bovine, rabbit and human cells. Particular cells include Drosophila Schneider 2 or S2 cells, human embryonic kidney (HEK) cells, neuronal, brain or nervous system cells, rat basophilic leukemia (RBL) cells, and immune system cells, e.g., lymphocytes such as T lymphocytes, including Jurkat cells.

[0327] In particular embodiments, neuronal, nervous system (e.g., CNS) or tissue-derived or brain cells that contain (endogenously and/or recombinantly) one or more proteins involved in modulating intracellular calcium as described above may be used in the methods of identifying agents that modulate intracellular calcium. Cells from a known cell line can be used, such as neuroblastoma SH-SY5Y cells, pheochromocytoma PC 2 cells, neuroblastoma SK-N-BE(2)C cells, human SK-N-MC neuroblastoma cells, SMS-KCNR cells, human LAN-5 neuroblastoma cells, human GI-CA-N neuroblatoma cells, human GOTO neuroblastoma cells, mouse Neuro 2a (N2A) neuroblastoma cells and/or human IMR 32 neuroblastoma cells. Primary cells, e.g., dorsal root ganglion and other primary neuronal or CNS-derived cells, can also be used in the methods. Other cell lines include HEK 293, CHO (including PZ3 CHO and CHO-K1), LTK-, N2A, H6, and HGB. The generation, maintenance and use of such cell lines is well known. The host cell for generation of a recombinant cell may be a less differentiated precursor cell, and preferably is one that is readily stably transfected.

[0328] The choice of a cell for use in practicing any of the methods for screening for or identifying an agent involved in modulating intracellular calcium can involve several considerations, including, for example, a particular protein that is being used in the method and a particular aspect or activity of intracellular calcium modulation that is being monitored in the method. For example, different cells (e.g., different cell types or cells of the same type from different species of organisms) may have different sets of molecules, including proteins and ion transport proteins, that participate in various aspects (e.g., store-operated calcium entry, receptor-mediated calcium movement, second messenger-operated calcium movement, calcium uptake, storage and/or release from intracellular compartments) of intracellular calcium modulation. Accordingly, a cell used in the methods can be selected to be one that provides (endogenously and/or recombinantly) a cellular environment conducive for functioning of any particular protein(s) (such as those provided herein and described above) being used in the method or supportive of any particular activity in intracellular calcium modulation that is being specifically monitored in the methods. Additionally, some cells may be more amenable to various manipulations that may be a part of some embodiments of the methods, e.g., recombinant expression of proteins, growth in culture, electrophysiological analysis, etc. Cells that are particularly suitable for specific embodiments of the methods can be determined empirically by those of skill in the art.

[0329] 6. Monitoring of Effects on Intracellular Calcium

[0330] In monitoring the effect of a test agent on intracellular calcium in any of the screening/identification methods provided herein, a direct or indirect evaluation or measurement of cellular (including cytosolic and intracellular organelle or compartment) calcium and/or movement of ions into, within or out of a cell, organelle, or portions thereof (e.g., a membrane) can be conducted. A variety of methods are described herein and/or known in the art for evaluating calcium levels and ion movements or flux. The particular method used and the conditions employed can depend on whether a particular aspect of intracellular calcium is being monitored. For example, as described herein, reagents and conditions are known, and can be used, for specifically evaluating store-operated calcium entry, resting cytosolic calcium levels and calcium levels and uptake by or release from intracellular organelles. The effect of test agent on intracellular calcium can be monitored using, for example, a cell, an intracellular organelle or storage compartment, a membrane (including, e.g., a detached membrane patch or a lipid bilayer) or a cell-free assay system.

[0331] Generally, monitoring the effect of a test agent on intracellular calcium involves contacting a test agent with or exposing a test agent to (1) a protein (and/or nucleic acid, or portion(s) thereof, encoding a protein) involved in modulating intracellular calcium (in particular, a protein provided herein) and/or (2) a cell, or portion(s) thereof (e.g., a membrane or intracellular structure or organelle) that may or may not contain a protein (and/or nucleic acid, or portion(s) thereof, encoding a protein) involved in modulating intracellular calcium. A cell can be one that exhibits one or more aspects of intracellular modulation, such as, for example, store-operated calcium entry. Before, during and/or after the contacting of test agent, a direct or indirect assessment of intracellular calcium can be made. An indirect assessment can be, for example, evaluation or measurement of current through an ion transport protein (e.g., a store-operated calcium channel), or transcription of a reporter protein operably linked to a calcium-sensitive promoter. A direct assessment can be, for example, evaluation or measurement of intracellular (including cytosolic and intracellular organelle) calcium.

[0332] The assessment of intracellular calcium is made in such a way as to be able to determine an effect of an agent on intracellular calcium. Typically, this involves comparison of intracellular calcium in the presence of a test agent with a control for intracellular calcium. For example, one control is a comparison of intracellular calcium in the presence and absence of the test agent or in the presence of varying amounts of a test agent. Thus, one method for monitoring an effect on intracellular calcium involves comparing intracellular calcium before and after contacting a test agent with a test cell containing a protein that modulates intracellular calcium, or comparing intracellular calcium in a test cell that has been contacted with test agent and in a test cell that has not been contacted with test agent (i.e., a control cell). Generally, the control cell is substantially identical to, if not the same as, the control cell, except it is the cell in the absence of test agent. A difference in intracellular calcium of a test cell in the presence and absence of test agent indicates that the agent is one that modulates intracellular calcium.

[0333] Another method for monitoring an effect on intracellular calcium involves comparing intracellular calcium of a test cell and a control cell that is substantially similar to the test cell (e.g., a cell containing a protein (and/or nucleic acid encoding a protein) involved in intracellular calcium, such as the proteins provided herein) but that does not contain the particular protein involved in modulating intracellular calcium. Thus, for example, if the test cell containing the protein involved in intracellular calcium modulation is a recombinant cell generated by transfer of nucleic acid encoding the protein into a host cell, then one possible control cell is a host cell that has not been transfected with nucleic acid encoding the protein. Such a cell would be substantially similar to the test cell but would differ from the test cell essentially only by the absence of the introduced nucleic acid encoding the protein. Thus, a control cell may contain, e.g., endogenously, the particular protein involved in modulating intracellular calcium, in which case the test cell would contain higher levels of (or overexpress) the particular protein. This type of control comparison is particularly of use when it is desired to identify an agent that specifically modulates intracellular calcium via an effect on, or modulation of, a particular protein (and/or nucleic acid, or portion(s) thereof, encoding a particular protein). Thus, for example, if there is no detectable or substantial difference in intracellular calcium in the test and control cells in the presence of the agent, it is not likely that the agent has an effect on intracellular calcium that is specifically mediated via the particular protein (or nucleic acid encoding the protein). If there is a detectable or substantial difference in intracellular calcium in the test and control cells in the presence of the test agent, then the test agent may be a candidate agent that specifically modulates intracellular calcium via an effect on or modulation of the particular protein. A candidate agent can be subjected to further control assays to compare intracellular calcium in test cells in the presence and absence of test agent or to compare intracellular calcium in control cells in the presence and absence of test agent, which can aid in determination of whether a candidate agent is an agent that modulates intracellular calcium.

[0334] An assessment of intracellular calcium conducted to monitor the effect of test compound on intracellular calcium can be made under a variety of conditions. Conditions can be selected to evalulate the effect of test compound on a specific aspect of intracellular calcium. For example, as described herein, reagents and conditions are known, and can be used, for specifically evaluating store-operated calcium entry, resting cytosolic calcium levels and calcium levels of and calcium uptake by or release from intracellular organelles. For example, as described herein, calcium levels and/or calcium release from the endoplasmic reticulum can directly be assessed using mag-fura 2, endoplasmic reticulum-targeted aequorin or cameleons. One method for indirect assessment of calcium levels or release is monitoring intracellular calcium levels (for example using fluorescence-based methods) after exposing a cell to an agent that effects calcium release (actively, e.g., IP₃, or passively, e.g., thapsigargin) from the organelle in the absence of extracellular calcium.

[0335] Resting cytosolic calcium levels, intracellular organelle calcium levels and cation movement may be assessed using any of the methods described herein or known in the art (see, e.g., descriptions herein of calcium-sensitive indicator-based measurements, such as fluo-3, mag-fura 2 and ER-targeted aequorin, labelled calcium (such as ⁴⁵Ca²⁺)-based measurements, and electrophysiological measurements). Particular aspects of ion flux that may be assessed include, but are not limited to, a reduction (including elimination) or increase in the amount of ion flux, altered biophysical properties of the ion current, and altered sensitivities of the flux to activators or inhibitors of calcium flux processes, such as, for example, store-operated calcium entry. Reagents and conditions for use in specifically evaluating receptor-mediated calcium movement and second messenger-operated calcium movement are also available.

[0336] In particular embodiments of the methods for screening for or identifying agents that modulate intracellular calcium, the methods are conducted under conditions that permit store-operated calcium entry to occur (see, e.g., the EXAMPLES). Such conditions are described herein and are known in the art. Test agents can be contacted with a protein and/or nucleic acid encoding a protein (such as the proteins and nucleic acids provided herein) involved in modulating intracellular calcium and/or a cell (or portion thereof) containing such a protein (or nucleic acid) under these appropriate conditions. For example, in conducting one method for screening for an agent that modulates intracellular calcium under conditions selected for evaluating store-operated calcium entry, intracellular calcium levels of test cells are monitored over time using a fluorescent calcium indicator (e.g., FLUO-4). Store-operated calcium entry into the cells is detected as an increase in fluorescence (i.e., increase in intracellular calcium levels) in response to conditions under which store-operated calcium entry occurs. The conditions include addition of a store-depletion agent, e.g., thapsigargin (which inhibits the ER calcium pump and discharge calcium stores) to the media of cell that has been incubated in Ca²⁺-free buffer, incubation with thapsigargin for about 5-15 minutes, addition of test compound (or vehicle control) to the media and incubation of the cell with test agent for about 5-15 minutes, followed by addition of external calcium to the media to a final concentration of about 1.8 mM. By adding thapsigargin to the cell in the absence of external calcium, it is possible to delineate the transient increase in intracellular calcium levels due to calcium release from calcium stores and the more sustained increase in intracellular calcium levels due to calcium influx into the cell from the external medium (i.e., store-operated calcium entry through the plasma membrane that is detected when calcium is added to the medium). Because the fluorescence-based assay allows for essentially continous monitoring of intracellular calcium levels during the entire period from prior to addition of thapsigargin until well after addition of calcium to the medium, not only can “peak” or maximal calcium levels (as well as total calcium entry) resulting from store-operated calcium entry be assessed in the presence and absence of test agent, a number of other parameters of the calcium entry process may also be evaluated, as described herein. For example, the kinetics of store-operated calcium entry can be assessed by evaluation of the time required to reach peak intracellular calcium levels, the up slope and rate constant associated with the increase in calcium levels, and the decay slope and rate constant associated with the decrease in calcium levels as store-operated calcium entry discontinues. Any of these parameters can be evaluated and compared in the presence and absence of test agent to determine whether the agent has an effect on store-operated calcium entry, and thus on intracellular calcium. In other embodiments, store-operated calcium entry can be evaluated by, for example, assessing a current across a membrane or into a cell that is characteristic of a store-operated calcium entry current (e.g., responsiveness to reduction in calcium levels of intracellular stores) or assessing transcription of reporter construct that includes a calcium-sensitive promoter element. In particular embodiments, a test agent is identified as one that produces at least a 50% difference in any aspect or parameter of store-operated calcium entry relative to control (e.g., absence of compound, i.e., vehicle only).

[0337] Generally, a test agent is identified as an agent, or candidate agent, that modulates intracellular intracellular calcium if there is a detectable effect of the agent on intracellular calcium levels and/or ion movement or flux, such as a detectable difference in levels or flux in the presence of the test agent. In particular embodiments, the effect or differences can be substantial or statistically significant.

[0338] G. Systems

[0339] Also provided herein are systems for use in identifying an agent that modulates intracellular or cytoplasmic calcium. Such systems include a cell, or portion(s) thereof, containing one or more proteins, e.g., ion transport proteins (and/or nucleic acids or portions thereof encoding proteins), involved in modulating intracellular calcium (and, in particular embodiments, that is involved in, participates in, and/or provides for store-operated calcium entry, intracellular organelle calcium storage, uptake or release, and/or maintenance of resting cytosolic calcium levels) that has an amino acid sequence that is at least about 20%, or at least about 25%, or at least about 30%, or at least about 35%, or at least about 40%, or at least about 45%, at least about 46%, or at least about 47%, or at least about 48%, or at least about 49%, or at least about 50%, or at least about 52%, or at least about 55%, or at least about 60%, or at least about 65%, or at least about 70%, or at least about 75%, or at least about 80%, or at least about 85%, or at least about 90% or at least about 95% or more homologous to the protein encoded by the coding sequence of at least Drosophila gene CG5842 (Genbank Accession No. AAF49752; gi7294406 or SEQ ID NO: 4) or gene CG4536 (Genbank Accession No. AAF46203; gi7290757 or SEQ ID NO: 2). In particular embodiments, the protein is at least about 35%, or at least about 43% or at least about 44%, or at least about 45%, or at least about 46%, or at least about 47%, or at least about 48% or at least about 50% homologous to one or both of the proteins encoded by Drosophila genes CG4536 and CG5842. Such exemplary proteins may be homologous to the specified Drosophila proteins over at least about 25%, or at least about 27%, or at least about 30%, or at least about 35%, or at least about 40%, or at least about 43%, or at least about 45%, or at least about 50%, or at least about 51%, or at least about 52%, or at least about 53%, or at least about 54% or at least about 55%, or at least about 60%, or at least about 65%, or at least about 70%, or at least about 75%, or at least about 80%, or at least about 85%, or at least about 90%, or at least about 95% or more of the protein encoded by the coding sequence of at least Drosophila gene CG5842 (Genbank Accession No. AAF49752; gi7294406 or SEQ ID NO: 4) and/or gene CG4536 (Genbank Accession No. AAF46203; gi7290757 or SEQ ID NO: 2). In a particular embodiment, the protein is homolgous to the Drosophila protein over at least about 25%, or at least about 35%, or at least about 40%, or at least about 43%, or at least about 45%, or at least about 50%, or at least about 51%, or at least about 52% or more of the protein encoded by the coding sequence of at least Drosophila gene CG5842 (Genbank Accession No. AAF49752; gi7294406 or SEQ ID NO: 4) or gene CG4536 (Genbank Accession No. AAF46203; gi7290757 or SEQ ID NO: 2). In further particular embodiments, the protein(s) is/are any of those specified above with respect to the methods for screening for or identifying an agent that modulates intracellular calcium.

[0340] In particular embodiments of the systems, the protein(s) involved in modulating intracellular calcium are contained in cells. The cells can be isolated cells or cell cultures that endogenously express such protein(s) or recombinantly express such proteins as described above with respect to the methods for identifying agents. Systems in which the cells recombinantly express the proteins can be such that the cells are isolated cells or cell cultures or are contained within an animal,-in particular, a non-human animal, e.g., a non-human mammal.

[0341] The proteins (and/or nucleic acids encoding proteins) or cells (or portions thereof) of the sytem can be contained in a medium that contains an agent that provides for passive or active intracellular calcium store reduction or depletion (e.g., thapsigargin and other agents described herein or known in the art) and/or that contains a molecule or molecules that facilitate monitoring or measurement of intracellular calcium and/or calcium movement. Such molecules include fluorescent (or otherwise labeled) calcium indicators, trivalent cations, divalent cations other than calcium and calcium-buffering agents, e.g., calcium chelators.

[0342] H. Methods of Identifying Molecules Involved in Modulating Intracellular Calciums

[0343] Proteins (and/or nucleic acids encoding proteins) involved in modulating intracellular calcium, as described herein, further provide the basis for additional methods of identifying molecules involved in modulating intracellular calcium, as well as for methods of elucidating pathways, and elements thereof, of intracellular calcium modulation. Once a protein has been identified as one involved in modulating intracellular calcium, it can be used to identify molecules, in particular cellular components, that interact with it and that potentially function in the modulation of intracellular calcium. Additionally, the identification of molecules that interact with proteins involved in intracellular calcium modulation facilitates the dissection and elucidation of pathways and mechanisms of cellular calcium regulation and signaling. The elucidation of such pathways provides additional targets that can be modulated in methods of modulating intracellular calcium and for use in methods of identifying agents for modulating intracellular calcium. Because the dissection of such pathways also elucidates components of the pathway and interactions between the components, it further makes possible the refinement of methods of modulating intracellular calcium by the balanced targeting of modulation of one or more components and/or interactions of the pathway.

[0344] Particular proteins (and/or nucleic acids encoding proteins) involved in modulating intracellular calcium (and, in particular, proteins that are involved in, participate in, and/or provide for store-operated calcium entry, intracellular organelle calcium storage, uptake or release, and/or maintenance of resting cytosolic calcium levels) are provided herein. These proteins can thus be used in methods to identify molecules, in particular cellular components, that interact with the proteins and that may be involved in modulating intracellular calcium.

[0345] Provided herein are methods of identifying a candidate molecule involved in modulating intracellular calcium (and, in particular, that are involved in, participate in, and/or provide for store-operated calcium entry, intracellular organelle calcium storage, uptake or release, and/or maintenance of resting cytosolic calcium levels). The methods include a step of identifying a molecule, such as, for example, a cellular component, that interacts with a protein involved in intracellular calcium modulation.

[0346] 1. Proteins Involved in Intracellular Calcium Modulation

[0347] In one embodiment of the methods of identifying a candidate molecule involved in modulating intracellular calcium, the method includes a step of identifying a molecule, such as, for example, a cellular component, that interacts with the protein (or portion thereof) encoded by Drosophila gene CG4536 and/or CG5842, or a portion thereof. The candidate molecule can then be further tested for intracellular calcium-modulating properties by evaluating the effect of modulating the molecule and/or its interaction with the protein encoded by Drosophila gene CG4536 and/or CG5842 on intracellular calcium.

[0348] In another embodiment of the methods for identifying a candidate molecule involved in modulating intracellular calcium, the method includes a step of identifying a molecule, such as, for example, a cellular component, that interacts with a protein (or portion thereof) that is homologous to the protein encoded by Drosophila gene CG4536 and/or CG5842. In particular embodiments of these methods, the protein that is homologous to the protein encoded by Drosophila gene CG4536 and/or CG5842 has an amino acid sequence that is at least about 20%, or at least about 25%, or at least about 30%, or at least about 35%, or at least about 40%, or at least about 45%, at least about 46%, or at least about 47%, or at least about 48%, or at least about 49%, or at least about 50%, or at least about 52%, or at least about 55%, or at least about 60%, or at least about 65%, or at least about 70%, or at least about 75%, or at least about 80%, or at least about 85%, or at least about 90% or at least about 95% or more homologous to the protein encoded by the coding sequence of at least Drosophila gene CG5842 (Genbank Accession No. AAF49752; gi7294406 or SEQ ID NO: 4) or gene CG4536 (Genbank Accession No. AAF46203; gi7290757 or SEQ ID NO: 2). In particular embodiments, the protein is at least about 35%, or at least about 43% or at least about 44%, or at least about 45%, or at least about 46%, or at least about 47%, or at least about 48% or at least about 50% homologous to one or both of the proteins encoded by Drosophila genes CG4536 and CG5842. Such exemplary proteins may be homologous to the specified Drosophila proteins over at least about 25%, or at least about 27%, or at least about 30%, or at least about 35%, or at least about 40%, or at least about 43%, or at least about 45%, or at least about 50%, or at least about 51%, or at least about 52%, or at least about 53%, or at least about 54% or at least about 55%, or at least about 60%, or at least about 65%, or at least about 70%, or at least about 75%, or at least about 80%, or at least about 85%, or at least about 90%, or at least about 95% or more of the protein encoded by the coding sequence of at least Drosophila gene CG5842 (Genbank Accession No. AAF49752; gi7294406 or SEQ ID NO: 4) and/or gene CG4536 (Genbank Accession No. AAF46203; gi7290757 or SEQ ID NO: 2). In a particular embodiment, the protein is homolgous to the Drosophila protein over at least about 25%, or at least about 35%, or at least about 40%, or at least about 43%, or at least about 45%, or at least about 50%, or at least about 51%, or at least about 52% or more of the protein encoded by the coding sequence of at least Drosophila gene CG5842 (Genbank Accession No. AAF49752; gi7294406 or SEQ ID NO: 4) or gene CG4536 (Genbank Accession No. AAF46203; gi7290757 or SEQ ID NO: 2). In further particular embodiments, the protein(s) is/are any of those specified above with respect to the methods for screening for or identifying an agent that modulates intracellular calcium.

[0349] 2. Assaying for an Interaction between a Molecule and a Protein Involved in Modulating Intracellular Calcium

[0350] The methods provided herein for identifying a candidate molecule involved in modulating intracellular calcium, involve identifying an interaction between a molecule, such as, for example, a cellular component, and a protein (or portion thereof) involved in intracellular calcium modulation (and, in particular, that are involved in, participate in, and/or provide for store-operated calcium entry, intracellular organelle calcium storage, uptake or release, and/or maintenance of resting cytosolic calcium levels). The interaction can be any direct or indirect physical, biochemical, chemical or other interaction between a molecule and a protein involved in intracellular calcium modulation such as, for example, those described herein. There are a number of methods described herein and/or known in the art for identifying an interaction between a protein and other molecules, e.g., cellular components. Several such methods are described herein with respect to the methods for screening for or identifying agents that modulate intracellular calcium.

[0351] For example, one type of interaction that can occur between a candidate molecule involved in modulating intracellular calcium and a protein (or portion thereof) involved in intracellular calcium modulation is a binding interaction. A number of in vitro and cell-based binding assays are known in the art and can be modified as needed by one of skill in the art to identify molecules that bind to or interact with a protein involved in modulating intracellular calcium. In an one method, the protein involved in intracellular calcium modulation is contacted with cellular components (within the context of a cell or in isolation), cell medium, a cell and/or a cell extract and assayed for binding of a molecule to the protein involved in modulating intracellular calcium. Binding can be evaluated and detected using any of several methods known in the art for detecting binding of molecules to proteins, including, but not limited to, affinity chromatography (including Biacore and Ciphergen technologies), immunoprecipitation, ELISA assays, far-western blotting and other methods. Immunoassays to detect binding of molecules to a protein involved in intracellular calcium modulation can utilize antibodies (e.g., monoclonal and polyclonal) prepared against the protein or portions thereof. Methods of generating and testing antibodies against proteins are well known in the art. Interactions between a protein involved in intracellular calcium modulation and a candidate molecule involved in modulating intracellular calcium can also be identified using assays such as co-purification assays (e.g., GST pull-down assays, co-immunoprecipitation assay, chromatographic assays), phage display, ribozyme display, and protein arrays. Detection of in vitro binding or interaction between a candidate molecule and a protein involved in modulating intracellular calcium can involve a variety of approaches, such as, for example, nuclear magnetic resonance (NMR), mass spectroscopy, fluorescence spectroscopy, scintillation proximity assays (SPQ), surface plasmon resonance assays (available commercially from BIACORE; http://www.biacore.se/proteomics/), and others. Cell-based binding assays include, for example, yeast two-hybrid assays (see, e.g., U.S. Pat. Nos. 5,283,173, 5,468,614 and 5,667,973); bacterial two-hybrid assays (Juong (2001) J. Cell Biochem. Suppl. 37:53-57), and others. Such assays are particularly suitable for identifying polypeptides that interact with a protein involved in modulating intracellular calcium. Another cell-based assay for identification of molecules that interact with a protein, such as a protein involved in modulating intracellular calcium, is the tandem affinity purification (TAP) method (see, e.g., Rigaut et al. (1999) Nature Biotech. 17:1030-1032; Puig et al. (2001) Methods 24:218-229).

[0352] A molecule that has bound to the protein (or portion thereof) involved in intracellular calcium modulation can be characterized and identified using methods that are also well known in the art, including, for example, HPLC, FPLC, amino acid sequencing if the molecule is a protein, and cloning of nucleic acid encoding a molecule that is a protein.

[0353] Once a molecule is found to interact with a protein involved in modulating intracellular calcium, it can be further evaluated to assess its intracellular calcium-modulating properties. For example, a cell comprising the interacting molecule and the protein involved in modulating intracellular calcium can be used for such evaluations. The interaction between the molecule and the protein involved in intracellular calcium modulation can be disrupted or altered in the cell and then intracellular calcium can be monitored to determine if intracellular calcium is altered by the alteration in the interaction. Intracellular calcium can be assessed using any methods known in the art or described herein. In particular methods, store-operated calcium entry, resting cytosolic calcium levels and/or calcium levels in or ion movement into or out of an intracellular organelle is assessed. In another process for assessing the intracellular calcium-modulating properties of an interacting molecule, the amount of the molecule in such a cell (or any cell containing at least the interacting molecule) can also be altered, for example, increased, decreased or the molecule can be eliminated in the cell, and the effect of such alteration on intracellular calcium can be assessed. One method for altering the amount of the molecule in the cell, if the molecule is a protein produced by the cell, is to alter the expression of the protein in the cell. This can be accomplished using a variety of methods, including methods described herein, such as for example, RNA interference, antisense RNA methods, gene knock-out procedures and gene insertion/over-expression processes.

[0354] I. Methods of Modulating Intracellular Calcium

[0355] Provided herein are methods for modulating intracellular calcium. Modulation of intracellular calcium can be any alteration or adjustment in intracellular calcium including but not limited to alteration of calcium concentration or level in the cytoplasm and/or intracellular calcium storage organelles, e.g., endoplasmic reticulum, alteration in the movement of calcium into, out of and within a cell, alteration in the location of calcium within a cell, and alteration of the kinetics, or other properties, of calcium fluxes into, out of and within cells. In particular embodiments, intracellular calcium modulation can involve an alteration in basal or resting cytosolic calcium levels, store-operated calcium entry and/or calcium levels in or ion movement into or out of an intracellular organelle. In other embodiments, modulation of intracellular calcium can involve an alteration in receptor-mediated ion (e.g., calcium) movement, second messenger-operated ion (e.g., calcium) movement, calcium influx into or efflux out of a cell, and/or ion (e.g., calcium) uptake into or release from intracellular compartments, including, for example, endosomes and lysosomes.

[0356] Methods of modulating intracellular calcium provided herein include a step of modulating the level of, expression of, activity of or molecular interactions of a protein in a cell that has altered intracellular calcium, and, in particular, altered store-operated calcium entry, altered resting cytosolic calcium levels and/or altered calcium levels in or ion movement into or out of an intracellular organelle. The protein that is modulated can be, for example, an ion transport protein, calcium-binding protein or a protein that regulates an ion transport protein. In a particular embodiment, the protein is homologous to a protein encoded by a Drosophila gene that, when altered in its expression in a Drosophila cell, results in altered store-operated calcium entry into the cell. An alteration of store-operated ion flux into a cell can be a complete or nearly complete elimination of the activity, a reduction of the activity, an alteration in properties or characteristics (e.g., current properties or sensitivities) of the activity or an increase in the activity relative to the activity in a control cell (e.g., a cell such as a Drosophila cell) that has not been altered in its store-operated ion flux activity. Similarly, an alteration in gene expression may be complete or nearly complete elimination of the expression of a gene, a reduction in the expression of a gene, an increase in the expression of a gene, or an alteration in the protein encoded by the gene (such as truncation or other alteration that effectively renders the protein nonfunctional or provides for aberrant functioning of the protein) relative to the expression of the gene in a cell that has not been altered in its expression of the gene.

[0357] In another embodiment, the protein is homologous to a protein encoded by a Drosophila gene that, when altered in its expression in a Drosophila cell, results in altered intracellular calcium in the cell. An alteration in intracellular calcium can be any alteration in calcium level, movement, location, or other calcium alteration, in a cell. Thus, in one example, an alteration in intracellular calcium can be an alteration in the calcium level within an intracellular organelle or calcium storage compartment or an alteration in basal or resting cytosolic calcium levels. An alteration of intracellular calcium can be any change in intracellular calcium compared to intracellular calcium in a control cell (e.g., a Drosophila cell that does not have altered expression of the gene). Thus, an alteration of intracellular calcium can be, for example, an increase or decrease in basal or resting cytosolic calcium levels compared to control levels (e.g., levels in a Drosophila cell that does not have altered expression of the gene). Assessment of intracellular calcium can be conducted in a number of ways, such as by methods described herein or known in the art. For example, assessment of basal or resting calcium levels can be conducted as described in the EXAMPLES and by using any methods known in the art. An alteration in basal or resting cytosolic calcium can also be effected in a number of ways, including, but not limited to, alterations in calcium flux across the plasma membrane or membranes of intracellular organelles such as the endoplasmic reticulum.

[0358] In particular methods, the protein in the cell that is modulated is one that is homologous to the protein encoded by Drosophila gene CG4536 and/or CG5842 and that is involved in modulating intracellular calcium (and, in particular, that is involved in, participates in and/or provides for store-operated calcium entry, maintenance of resting cytosolic calcium levels and/or calcium storage in or uptake or relase of calcium from an intracellular organelle). In particular embodiments of these methods, the protein that is homologous to the protein encoded by Drosophila gene CG4536 and/or CG5842 has an amino acid sequence that is at least about 20%, or at least about 25%, or at least about 30%, or at least about 35%, or at least about 40%, or at least about 45%, at least about 46%, or at least about 47%, or at least about 48%, or at least about 49%, or at least about 50%, or at least about 52%, or at least about 55%, or at least about 60%, or at least about 65%, or at least about 70%, or at least about 75%, or at least about 80%, or at least about 85%, or at least about 90% or at least about 95% or more homologous to the protein encoded by the coding sequence of at least Drosophila gene CG5842 (Genbank Accession No. AAF49752; gi7294406 or SEQ ID NO: 4) or gene CG4536 (Genbank Accession No. AAF46203; gi7290757 or SEQ ID NO: 2). In particular embodiments, the protein is at least about 35%, or at least about 43% or at least about 44%, or at least about 45%, or at least about 46%, or at least about 47%, or at least about 48% or at least about 50% homologous to one or both of the proteins encoded by Drosophila genes CG4536 and CG5842. Such exemplary proteins may be homologous to the specified Drosophila proteins over at least about 25%, or at least about 27%, or at least about 30%, or at least about 35%, or at least about 40%, or at least about 43%, or at least about 45%, or at least about 50%, or at least about 51%, or at least about 52%, or at least about 53%, or at least about 54% or at least about 55%, or at least about 60%, or at least about 65%, or at least about 70%, or at least about 75%, or at least about 80%, or at least about 85%, or at least about 90%, or at least about 95% or more of the protein encoded by the coding sequence of at least Drosophila gene CG5842 (Genbank Accession No. AAF49752; gi7294406 or SEQ ID NO: 4) and/or gene CG4536 (Genbank Accession No. AAF46203; gi7290757 or SEQ ID NO: 2). In a particular embodiment, the protein is homolgous to the Drosophila protein over at least about 25%, or at least about 35%, or at least about 40%, or at least about 43%, or at least about 45%, or at least about 50%, or at least about 51%, or at least about 52% or more of the protein encoded by the coding sequence of at least Drosophila gene CG5842 (Genbank Accession No. AAF49752; gi7294406 or SEQ ID NO: 4) or gene CG4536 (Genbank Accession No. AAF46203; gi7290757 or SEQ ID NO: 2). In further particular embodiments, the protein(s) is/are any of those specified above with respect to the methods for screening for or identifying an agent that modulates intracellular calcium, including, for example, a calcium transport protein 1 (CaT protein), an ECaC protein, an epithelial calcium channel, a CaT2 protein, an olfactory channel, a stretch-activated channel protein, a vanilloid receptor-related osmotically activated channel protein, a vanilloid receptor type 1-like protein, a vanilloid receptor subtype 1 protein, a vanilloid receptor 1 protein, a vanilloid receptor-like protein, a capsaicin receptor protein, an olfactory trp C4 (OTRPC4) protein, a growth factor-regulated calcium channel protein, a transient receptor potential protein 12 (trp12), a transient receptor potential protein V3 (TRPV3), a stretch-inhibitable nonselective channel (SIC) protein.

[0359] Methods of modulating intracellular calcium include a step of modulating the level of, expression of, activity of, functioning and/or molecular interactions of a protein involved in modulating intracellular calcium. For example, the methods may include a step of contacting a cell with an agent that modulates the level, functioning and/or activity of one or more proteins involved in modulating intracellular calcium.

[0360] Agents that can modulate the activity of the protein include, but are not limited to, substances that increase, decrease or otherwise alter the activity and/or functioning of the protein. Activities of calcium-modulating proteins include, but are not limited to, calcium transport, calcium binding, and regulation of calcium-modulating proteins. Thus, agents that modulate these activities, or any other activity involved in intracellular calcium modulation, can be used in the methods provided herein. For example, antibodies or other proteins that specifically bind to the protein and modulate such activities can be agents used in the methods. An antibody or other protein may, for instance, bind to a site of a regulatory protein and reduce or eliminate its binding to the protein it regulates, thereby reducing its regulatory activity. Ions other than calcium or molecules, such as small organic molecules, can also be agents that may, for example, reduce or increase calcium transport by an ion transport protein and thus can be agents used in the methods.

[0361] J. Diseases

[0362] Because of the important role that calcium regulation plays in many cellular processes and, more particularly, the influence that store-operated calcium influx has on a number of cellular functions including cellular activation, gene expression, and apoptotic cell death, store-operated calcium entry or influx (SOCI) is thought to have a role in the many disease and disorders involving such cellular activities. These diseases and disorders include neurological, inflammatory, liver and kidney diseases and disorders, malignancies, aging, sensitivity to pain and sensitivity to touch. Thus, the proteins described herein and their derivatives are useful for studying the processes related to such diseases and disorders and for discovering drugs for treatment. The methods provided for identifying agents that modulate intracellular calcium have uses in discovering agents that have use in studying store-operated calcium entry processes (such as agents that may be specific activators or inhibitors) and also may be used in therapies for such diseases and disorders.

[0363] 1. Neurological Diseases and Disorders

[0364] Neurological diseases and disorders include but are not limited to Alzheimer's disease (AD), Parkinson's disease, Huntington's disease, amyotrophic lateral sclerosis (ALS), and other brain disorders caused by trauma or other insults including aging.

[0365] There is ample evidence that mechanisms associated with calcium signaling may be altered in many neurodegenerative diseases and disorders resulting from brain injury. For example, fibroblasts or T-lymphocytes from patients with AD have consistently displayed and increase in Ca2+ release from intracellular stores compared to controls (Ito et al. (1994) PNAS, 91:534-538; Gibson et al., (1996) BBA, 1316:71-77; Etchenberrigaray et al., (1998) Neurobiology of Disease, 5:37-45). Consistent with these observations, mutations in presenilin genes (PS1 or PS2) associated with familial AD (FAD) have been shown to increase InsP3-mediated Ca2+ release from internal stores (Guo et al., (1996) Neuro Report, 8:379-383; Leissring et al., (1999) J. Neurochemistry, 72:1061-1068; Leissring et al., (1999) JBC, 274(46):32535-32538; Leissring et al., (2000) JBC, 149(4):793-797; Leissring et al., (2000) PNAS, 97(15):8590-8593). Furthermore, Yoo et al. ((2000) Neuron, 27(3):561-572) have shown that mutations in PS1 or PS2 that increase the amyloidogenic amyloid β peptide (Aβ42) generation in AD are associated with a decrease in CCE, and that direct pharmacological blockage of CCE increases Aβ42 levels in a concentration-dependent manner.

[0366] Experimental traumatic brain injury has been shown to initiate massive disturbances in Ca2+ concentrations in the brain that may contribute to further neuronal damage. Intracellular Ca2+ may be elevated by many different ion channels including store-operated channels. It has been further shown that channel blockers may be beneficial in the treatment of neurological motor dysfunction when administered in the acute posttraumatic period (Cheney, Jessica, et al., (2000) J. of Neurotrauma, 17(1):83-91).

[0367] 2. Inflammatory Disease

[0368] Methods provided herein may also be used in connection with treatment of inflammatory diseases. These diseases include but are not limited to asthma, chronic obstructive pulmonary disease, rheumatoid arthritis, inflammatory bowel disease, glomerulonephritis, neuroinflammatory diseases such as multiple sclerosis, and disorders of the immune system.

[0369] Vanilloid receptor 1 (VR1) is expressed by sensory neurons. Once activated, these neurons evoke the sensation of burning pain and stimulate the release of neuropeptides that induce neurogenic inflammation. VR1 immunoreactivity is greatly increased in colonic nerve fibers of patients with active inflammatory bowel disease (Yiangou, Y. et al., (2001) Lancet (North American Edition) 357 (9265): 1338-1339). VR1 receptors have also been shown to play a role in airway inflammation (Veronesi, Bellina, et al., (2000) Toxicology and Applied Pharmacology 169 (1): 66-76) and may, thus, be important in the treatment of chronic obstructive pulmonary disease.

[0370] The activation of neutrophils (PMN) by inflammatory mediators is partly achieved by increasing cytosolic calcium concentration ((Ca2+)i). Store-operated calcium influx (SOCI) in particular is thought to play an important role in PMN activation. It has been shown that trauma increases PMN SOCI (Hauser, Carl J. et al., (2000) Journal of Trauma Injury Infection and Critical Care 48 (4): 592-598) and that prolonged elevations of (Ca2+)i due to enhanced SOCI may alter stimulus-response coupling to chemotaxins and contribute to PMN dysfunction after injury. Modulation of PMN (Ca2+)i through SOC channels might therefore be useful in regulating PMN-mediated inflammation and spare cardiovascular function after injury, shock or sepsis (Hauser, Carl J. et al., (2001) Journal of Leukocyte Biology 69 (1): 63-68).

[0371] 3. Cancer

[0372] Methods provided herein may also be used in connection with treatment of malignancies, and more particularly those malignancies treatable by non-steroidal anti-inflammatory drugs. These malignancies may including but are not limited to malignancies of lymphoreticular origin, bladder cancer, breast cancer, colon cancer, endometrial cancer, endometrial cancer, head and neck cancer, lung cancer, melanoma, ovarian cancer, prostate cancer and rectal cancer.

[0373] Non-steroidal anti-inflammatory drugs (NSAIDs) inhibit proliferation and angiogenesis in colorectal cancer. Weiss et. al. has indicate that store-operated calcium entry may play an important role in cell proliferation in cancer cells and, therefor, inhibition of store-operated calcium entry may contribute to the anti-proliferative effect of non-steroidal anti-inflammatory drugs in human colon cancer cells (Weiss, Helmut, et al., (2001) International Journal of Cancer 92 (6): 877-882). While inhibition of SOCI may aid in the treatment of such cells, the following example shows that other cells of the body may benefit from potentiators SOCI during treatment with NSAIDs.

[0374] A major function of prostaglandins is to protect the gastric mucosa. Included in this function is the modulation of store-operated calcium influx in human gastric cells which plays a critical role in cell proliferation. Consequently, inhibition of prostaglandins by nonsteroidal anti-inflammatory drugs (NSAIDs) inhibits store-operated calcium influx in gastric cells (Kokoska, Evan R., et al., (1998) Surgery (St Louis) 124 (2): 429-437). The NSAIDs that relieve inflammation most effectively also produce the greatest gastrointestinal damage (Canadian Family Physician, January 1998, p. 101). Thus, the ability to independently modulate store-operated calcium channels in specific cell types may help to alleviate such side effect of anti inflammatory therapy.

[0375] 4. Liver Diseases and Disorders

[0376] Methods provided herein may also be used in connection with treatment of Liver diseases and disorders. These diseases and disorders include but are not limited to Alcoholic liver disease, liver injury, for example, due to transplantation, hepatitis, cancer, and cirrhosis.

[0377] SOCI has been implicated in chronic liver disease (Tao, Jiangchuan, et al., (1999) J. Bio. Chem., 274(34):23761-23769) as well as transplantation injury after cold preservation-warm reoxygenation (Elimadi, Aziz, et al., (2001) Am J. Physiology, 281(3 Part 1): G809-G815. Chronic ethanol consumption has been shown to impair liver regeneration, in part, by modulating SOCI (Zhang, Bao-Hong et al., (1996) J. of Clinical Investigation 98(5):1237-1244).

[0378] 5. Kidney Diseases and Disorders

[0379] Methods provided herein may also be used in connection with treatment of kidney diseases and disorders. Mesangial cell hyperplasia is often a key feature of such diseases and disorders. Such diseases and disorders may be caused by immunological or other mechanisms of injury, including IgAN, membranoproliferative glomerulonephritis or lupus nephritis. Imbalances in the control of mesangial cell replication also appear to play a key role in the pathogenesis of progressive renal failure.

[0380] The turnover of mesangial cells in normal adult kidney is very low with a renewal rate of less than 1%. A prominent feature of glomerular/kidney diseases is mesangial hyperplasia due to elevated proliferation rate or reduced cell loss of mesangial cells. When mesangial cell proliferation is induced without cell loss, for example due to mitogenic stimulation mesangioproliferative glomerulonephritis can result. Data has indicated that regulators of mesangial cell growth, particularly growth factors, may act by regulating store-operated calcium channels (Ma, Rong, et al., (2001) J. Am. Soc. of Nephrology, 12:(1) 47-53. Thus, modulators of store-operated calcium influx may aid in the treatment of glomerular diseases by inhibiting mesangial cell proliferation. The epithelial calcium channel CaT2 has also been implicated in hypercalciuria and resultant renal stone formation (Peng, Ji-Bin, et al., (2000) J. Biol. Chem., 275(36):28186-28194).

[0381] K. Methods of Identifying Agents for the Treatment of a Disease or Disorder

[0382] Disease models are a valuable tool for the discovery and testing of treatment agents. Such disease models may be cellular or organismal and may be produced by methods known to those of skill in the art and described herein. Provided herein are models for diseases and disorders involving or characterized at least in part by calcium dyshomeostasis or alterations in calcium signalling. Also provided herein are methods of identifying candidate agents for the treatment of such diseases and disorders which utilize the models.

[0383] 1. Cell Models

[0384] Cell models for the identification and testing of candidate agents for the treatment of diseases and disorders involving or characterized at least in part by calcium dyshomeostasis or alterations in calcium signalling are provided herein. The cell models can also be used in elucidating the mechanisms underlying calcium dyshomeostasis or altered calcium signalling in a cell as well as in dissecting processes involved in intracellular calcium regulation.

[0385] In a particular embodiment, the cell model includes a recombinant cell that contains heterologous nucleic acid encoding one or more proteins involved in intracellular calcium modulation homologous to a protein encoded by a Drosophila gene that, when altered in its expression in a Drosophila cell, results in altered store-operated calcium entry into the cell. An alteration of store-operated ion flux into a cell can be a complete or nearly complete elimination of the activity, a reduction of the activity, an alteration in properties or characteristics (e.g., current properties or sensitivities) of the activity or an increase in the activity relative to the activity in a control cell (e.g., a cell such as a Drosophila cell) that has not been altered in its store-operated ion flux activity. Similarly, an alteration in gene expression may be complete or nearly complete elimination of the expression of a gene, a reduction in the expression of a gene, an increase in the expression of a gene, or an alteration in the protein encoded by the gene (such as truncation or other alteration that effectively renders the protein nonfunctional or provides for aberrant functioning of the protein) relative to the expression of the gene in a cell that has not been altered in its expression of the gene.

[0386] In another embodiment, the cell model includes a recombinant cell that contains heterologous nucleic acid encoding one or more proteins involved in intracellular calcium modulation homologous to a protein encoded by a Drosophila gene that, when altered in its expression in a Drosophila cell, results in altered intracellular calcium in the cell. An alteration in intracellular calcium can be any alteration in calcium level, movement, location, or other calcium alteration, in a cell. Thus, in one example, an alteration in intracellular calcium can be an alteration in the calcium level within an intracellular organelle or calcium storage compartment or an alteration in basal or resting cytosolic calcium levels. An alteration of intracellular calcium can be any change in intracellular calcium compared to intracellular calcium in a control cell (e.g., a Drosophila cell that does not have altered expression of the gene). Thus, an alteration of intracellular calcium can be, for example, an increase or decrease in basal or resting cytosolic calcium levels compared to control levels (e.g., levels in a Drosophila cell that does not have altered expression of the gene). Assessment of intracellular calcium can be conducted in a number of ways, such as by methods described herein or known in the art. For example, assessment of basal or resting calcium levels can be conducted as described in Example 3 and by using any methods known in the art. An alteration in basal or resting cytosolic calcium can also be effected in a number of ways, including, but not limited to, alterations in calcium flux across the plasma membrane or membranes of intracellular organelles such as endocytic organelles.

[0387] In a further embodiment, the cell model includes a recombinant cell that contains heterologous nucleic acid encoding one or more proteins involved in intracellular calcium modulation homologous to a protein encoded by a Drosophila gene that, when altered in its expression in a Drosophila cell, results in altered store-operated calcium entry into the cell and altered basal or resting cytosolic calcium levels.

[0388] In particular embodiments of the above models, the recombinant cell contains heterologous nucleic acid encoding one or more proteins that has an amino acid sequence that is at least about 20%, or at least about 25%, or at least about 30%, or least about 35%, or at least about 40%, or at least about 45%, or at least about 50%, or at least about 52%, or at least about 55%, or at least about 60%, or at least about 65%, or at least about 70%, or at least about 75%, or at least about 80%, or at least about 85%, or at least about 90%, or at least about 95% or more homologous to the protein encoded by the coding sequence of a Drosophila gene that, when altered in its expression, results in altered store-operated calcium entry into the cell and/or altered intracellular calcium. The particular homology can depend on the particular protein, e.g., species, that is homologous to the Drosophila gene, the extent of the encoded Drosophila protein to which the particular protein is homologous, and can also depend on the particular Drosophila gene that, when altered in its expression in a Drosophila cell, results in altered store-operated calcium entry into the cell and/or altered intracellular calcium. In particular embodiments, the protein is at least 52% or more homologous to the protein encoded by the coding sequence of the Drosophila gene. Such exemplary proteins may be homologous to the specified Drosophila protein over at least about 25%, or at least about 30%, or at least about 35%, or at least about 40%, or at least about 45%, or at least about 50%, or at least about 54%, or least about 55%, or at least about 60%, or at least about 65%, or at least about 70%, or at least about 75%, or at least about 80%, or at least about 85%, or at least about 90%, or at least about 95% or more of the protein encoded by the coding sequence of the Drosophila gene. In particular embodiments, the protein is homologous to the Drosophila protein over at least about 54% or more of the protein encoded by the coding sequence of the Drosophila gene.

[0389] In another particular embodiment of the above models, the one or more proteins encoded by the heterologous nucleic acid is at least about 52% homologous over at least about 54% of the protein encoded by the coding sequence of the Drosophila gene that, when altered in its expression, results in altered store-operated calcium entry into the cell and/or altered intracellular calcium.

[0390] In a particular embodiment, the cell model includes a recombinant cell that contains heterologous nucleic acid encoding one or more proteins homologous to a protein encoded by the coding sequence of Drosophila gene CG4536 or CG5842 as described herein. The particular homology can depend on the particular protein, e.g., species, that is homologous to the protein encoded by Drosophila gene and the extent of the protein encoded by Drosophila gene to which the particular protein is homologous.

[0391] Thus, the proteins include those that is (are) at least about 35% homologous to the protein encoded by Drosophila gene CG4536 or CG5842 over at least about 40% of the encoded protein and that provides for store-operated calcium entry. In other embodiments of a protein is homologous to the protein encoded by the Drosophila gene is at least about 35% homologous to the protein encoded by Drosophila gene CG4536 or CG5842 over at least about 50%, 51% or 52% of the encoded protein and that provides for store-operated calcium entry with a test agent or is at least about 41% homologous to the protein encoded by Drosophila gene CG4536 or CG5842 over at least about 50%, 51% or 52% of the encoded protein and that provides for store-operated calcium entry with a test agent. In other embodiments, the protein homologous to the protein encoded by the Drosophila gene is selected to be one that does not contain the contiguous sequence of amino acids EWKFAR (SEQ ID 114) and/or EXD(E)CR(K)GXYXXYE (SEQ ID 115), wherein X is any amino acid and an amino acid residue in parentheses is an alternative to the residue immediately preceding it.

[0392] Exemplary proteins are a calcium transport protein 1 (CaT protein), an ECaC protein, an epithelial calcium channel, a CaT2 protein, an olfactory channel, a stretch-activated channel protein, a vanilloid receptor-related osmotically activated channel protein, a vanilloid receptor type 1-like protein, a vanilloid receptor subtype 1 protein, a vanilloid receptor 1 protein, a vanilloid receptor-like protein, a capsaicin receptor protein, an olfactory trp C4 (OTRPC4) protein, a growth factor-regulated calcium channel protein, a transient receptor potential protein 12 (trp12), a transient receptor potential protein V3 (TRPV3), a stretch-inhibitable nonselective channel (SIC) protein. The protein that provide for store-operated calcium entry includes proteins that are components, such as subunits of a store-operated calcium channel, and includes proteins that affect, directly or indirectly, the activity, expression or level of such components. Also, the proteins can be from any source, particularly mammalian sources, and include human proteins.

[0393] In particular embodiments, the cell model includes a recombinant cell that contains heterologous nucleic acid encoding a polymorphic or mutant form of one or more of the above-identified proteins. Such a polymorphic or mutant protein can be one that has an altered activity or function or one that has no activity or is non-functional, particularly relative to a wild-type or predominant form of the protein.

[0394] In another embodiment, cell models provided herein for the identification and testing of candidate agents for the treatment of diseases and disorders involving or characterized by calcium dyshomeostasis or altered calcium regulation can include a recombinant cell in which expression of a protein involved in intracellular calcium modulation as identified above, which is either endogenously expressed in the cell or which is expressed in the cell from a heterologous nucleic acid, has been altered or eliminated, such as by replacing or modifying the promoter region or other regulatory region driving expression of nucleic acid encoding the protein. Such a cell can be produced, using methods known in the art and described herein, by introduction into a cell of heterologous nucleic acid that either targets and alters DNA regulatory sequences associated with an endogenous gene or that links DNA encoding the protein to a particular expression regulation sequence(s). Cell models including a recombinant cell in which expression of an endogenous protein involved in intracellular calcium modulation as identified above has been reduced or eliminated can be produced by disruption or elimination (e.g., through gene knock-out, antisense RNA or RNA interference methods) of the gene or RNA encoding the protein in the cell.

[0395] In a further embodiment, the cell model includes a recombinant cell that expresses one or more proteins involved in intracellular calcium regulation, such as identified above, as heterologous protein(s). Such cells may overexpress or mis-express the heterologous protein(s). For example, a recombinant cell may be one that endogenously expresses the protein(s) and also has been transfected with additional copies of nucleic acid encoding the protein(s). Alternatively, the host cell used in the generating the recombinant cell may be one that endogenously expresses little to none of the protein(s) of interest.

[0396] Any cell may be used in generating the cell models. In particular embodiments of the cell models, the cell is a neuronal, nervous system- or tissue-derived cell or a brain cell. For example, cells from a known cell line can be used, such as from neuroblastoma SH-SY5Y cells, pheochromocytoma PC12 cells, neuroblastoma SK-N-BE(2)C cells, human SK-N-MC neuroblastoma cells, SMS-KCNR cells, human LAN-5 neuroblastoma cells, human GI-CA-N neuroblastoma cells, human GOTO neuroblastoma cells, mouse Neuro 2a (N2A) neuroblastoma cells and/or human IMR 32 neuroblastoma cells. Cell lines include HEK 293, CHO (including CHO-K1), LTK-, N2A, H6, HGB, and Drosophlia S2 cells. The generation, maintenance and use of such cell lines is well known.

[0397] 2. Animal Models Transgenic animal models and animals for the identification and testing of candidate agents for the treatment of diseases and disorders involving or characterized by calcium dyshomeostasis or altered calcium regulation are provided herein. The animal models can also be used in elucidating the mechanisms underlying calcium dyshomeostasis in an organism as well as in dissecting processes involved in intracellular calcium regulation. Transgenic animals include, but are not limited to, non-human animals, such as rodents (e.g., mice and rats), cows, chickens, pigs, goats, sheep, insects, Drosophila, nematodes, worms, C. elegans, monkeys, gorillas, and other primates.

[0398] In particular embodiments, the transgenic non-human animals are such that the expression of nucleic acid encoding one or more proteins as identified above with respect to cell models is altered or eliminated in at least some cells in the animal. Alteration or elimination of expression of the protein(s) can be achieved in a number of ways. For example, expression can be altered by replacing or modifying the promoter region or other regulatory region of an endogenous gene encoding the protein(s) in the animal. Such an animal can be produced by promoting recombination between endogenous nucleic acid and an exogenous nucleic acid.

[0399] Increased expression of one or more of the proteins in a transgenic animal can be achieved by altering or replacing an endogenous promoter or by introducing additional copies of nucleic acid encoding the protein(s) into the animal. Reduction or elimination of expression of one or more of the proteins can be achieved by disruption or “knockout” of endogenous genes in the animal. For example, such an animal can initially be produced by promoting homologous recombination between a gene of interest in its chromosome and the corresponding exogenous gene of interest that has been rendered biologically inactive (typically by insertion of a heterologous sequence, e.g., an antibiotic resistance gene). In some organisms, e.g., C. elegans, it is possible to reduce or eliminate expression of a gene encoding a protein by introduction of double-stranded RNA that contains sequence identical or complementary to at least a portion of the sequence of the gene of interest into the animal.

[0400] Transgenic animals also include animals containing nucleic acids encoding mutant or polymorphic forms of the one or more proteins. Such animals can be prepared by “knock-in” methods in which the endogenous form (e.g., “normal”) of a gene encoding the protein(s) is replaced by a variant, such a mutant, or other form. It is also possible to replace one species, such as a rodent's, endogenous gene with a gene from another species, such as from a human. Transgenic animals also can be produced by non-homologous recombination into other sites in a chromosome; including animals that have a plurality of integration events.

[0401] Introduction of nucleic acids into cells for generation of transgenic animals can be conducted using any known method of nucleic acid delivery, including, but not limited to, microinjection, lipofection and other modes of nucleic acid delivery. The nucleic acids can be introduced into cells such as, for example, germlne cells or somatic cells, such as an embryonic stem cell. For example, the nucleic acid can be introduced into a cell, such as an embryonic stem cell (ES), followed by injecting the ES cells into a blastocyst, and implanting the blastocyst into a foster mother, which is followed by the birth of a transgenic animal. Nuclear transfer methods, in which nucleic acid being used to generate a transgenic animal is introduced into a nuclear donor cell containing a totipotent nucleus, followed by transfer of the donor nucleus into a recipient cell, e.g., an enucleated oocyte, which can be transferred to a recipient female for development into a transgenic animal.

[0402] In one method of generating a “knock-out” transgenic animal, homologous recombination is performed by transforming embryo-derived stem (ES) cells with a vector containing the insertionally inactivated gene of interest, such that homologous recombination occurs, followed by injecting the ES cells into a blastocyst, and implanting the blastocyst into a foster mother, followed by the birth of the chimeric animal (“knockout animal”) in which a gene of interest has been inactivated (see Capecchi, Science 244:1288-1292 (1989)). The chimeric animal can be bred to produce homozygous knockout animals, which can then be used to produce additional knockout animals. Knockout animals include, but are not limited to, mice, hamsters, sheep, pigs, cattle, and other non-human mammals. The resulting animals can serve as models of diseases involving altered expression of a protein involved in intracellular calcium modulation. Such knockout animals can be used to screen for candidate therapeutic agents or to test molecules that have already been identified as candidate therapeutic agents for the ability to treat or prevent such diseases or disorders.

[0403] 3. Evaluation of Models and Effects of Test Agents Thereon

[0404] Cell and animal models of diseases and disorders involving calcium dyshomeostasis described herein have a number of uses. For example, by evaluating the cellular or organismal phenotypes associated with the altered expression of proteins involved in intracellular calcium modulation in the cells/organisms and correlating such phenotypes with specific cellular molecules and processes, the disease/disorder models can be used in elucidating the mechanisms underlying calcium dyshomeostasis in a cell as well as in dissecting processes and pathways involved in intracellular calcium regulation. In addition, by evaluating the effects of test agents or candidate therapeutic agents on intracellular calcium and the phenotypic manifestations of the model cells/organisms, the models can be used in screening agents and testing candidate agents for the treatment of diseases and disorders that involve calcium dyshomeostasis.

[0405] In methods of screening candidate agents for the treatment of diseases and disorders, the model cells and/or organisms are contacted with a test or candidate agent. Before, during and/or after contacting with a test or candidate agent, intracellular calcium and/or calcium movement is evalulated. For example, resting cytosolic calcium levels and/or store-operated calcium entry in cells can be evaluated. A variety of methods may be used for evaluating such activity and are described herein and known in the art. A test agent that alters intracelluar calcium and/or movement of calcium into, out of or within disease model cells that exhibit calcium dyshomeostasis is identified as an agent that modulates intracellular calcium and possibly as a candidate agent for the treatment of a disease involving calcium dyshomeostasis. An agent that at least partially reverses or reduces or eliminates a disease trait or phenotype exhibited by a model cell or organism, or that tends to restore calcium homeostasis and/or modulates calcium signaling or movement to compensate for disease-associated abnormalities in intracellular calcium is identified as a candidate agent for the treatment of a disease involving calcium dyshomeostasis. A candidate agent for use in treatment of a disease or disorder is thus one that ameliorates or eliminates the symptoms and/or manifestations of an inherited or acquired disease or disorder or one that cures the disease or disorder or at least partially restores the wild-type phenotype. This may include modulation of calcium homeostasis, resting cytosolic calcium levels, and/or store operated calcium entry in model cells and/or organisms.

[0406] L. Methods of Treating a Disease or Disorder

[0407] Methods provided herein for identifying proteins involved in modulating intracellular calcium as well as agents that modulate intracellular calcium are useful in elucidating cellular processes for calcium homeostasis and signalling. Because the methods can identify proteins, which were not previously known to be involved in intracellular calcium modulation, as calcium-modulating proteins, they are also useful in the discovery of methods for treating diseases and disorders involving calcium dyshomeostasis or altered intracellular calcium regulation.

[0408] Provided herein are methods for treating diseases and disorders involving calcium dyshomeostasis or altered intracellular calcium regulation. Such methods can include a step of administering to a subject having a disease or disorder involving calcium dyshomeostasis or altered intracellular calcium regulation, an agent that modulates the level and/or activity of a protein involved in modulation of intracellular calcium. In one embodiment of the methods for treating diseases and disorders, the agent being administered is one that modulates the level and/or activity of a protein that has an amino acid sequence that is homologous to a protein encoded by a Drosophila gene that, when altered in its expression in a Drosophila cell, results in altered store-operated calcium entry into the cell. An alteration of store-operated ion flux into a cell can be a complete or nearly complete elimination of the activity, a reduction of the activity, an alteration in properties or characteristics of the activity or an increase in the activity relative to the activity in a cell that has not been altered in its store-operated ion flux activity. Similarly, an alteration in gene expression may be complete or nearly complete elimination of the expression of a gene, a reduction in the expression of a gene, an increase in the expression of a gene, or an alteration in the protein encoded by the gene (such as truncation or other alteration that effectively renders the protein nonfunctional or provides for aberrant functioning of the protein) relative to the expression of the gene in a cell that has not been altered in its expression of the gene.

[0409] In another embodiment of the methods for treating diseases and disorders, the agent being administered is one that modulates the level and/or activity of a protein that has an amino acid sequence that is homologous to a protein encoded by a Drosophila gene that, when altered in its expression in a Drosophila cell, results in altered intracellular calcium in the cell. An alteration in intracellular calcium can be any alteration in calcium level, movement, location, or other calcium alteration, in a cell. Thus, in one example, an alteration in intracellular calcium can be an alteration in the calcium level within an intracellular organelle or calcium storage compartment or an alteration in basal or resting cytosolic calcium levels. An alteration of intracellular calcium can be any change in intracellular calcium compared to intracellular calcium in a control cell (e.g., a Drosophila cell that does not have altered expression of the gene). Thus, an alteration of intracellular calcium can be, for example, an increase or decrease in basal or resting cytosolic calcium levels compared to control levels (e.g., levels in a Drosophila cell that does not have altered expression of the gene). Assessment of intracellular calcium can be conducted in a number of ways, such as by methods described herein or known in the art. For example, assessment of basal or resting calcium levels can be conducted as described in Example 3 and by using any methods known in the art. An alteration in basal or resting cytosolic calcium can also be effected in a number of ways, including, but not limited to, alterations in calcium flux accross the plasma membrane or membranes of intracellular organelles such as endocytic organelles. In a further embodiment of the methods for treating a disease or disorder, the agent being administered is one that modulates the level and/or activity of a protein that has an amino acid sequence that is homologous to a protein encoded by a Drosophila gene that, when altered in its expression in a Drosophila cell, results in altered store-operated calcium entry into the cell and altered basal or resting cytosolic calcium levels.

[0410] In particular embodiments of the above methods, the agent being administered is one that modulates the level and/or activity of a protein that has an amino acid sequence that is at least about 20%, or at least about 25%, or at least about 30%, or least about 35%, or at least about 40%, or at least about 45%, or at least about 50%, or at least about 52%, or at least about 55%, or at least about 60%, or at least about 65%, or at least about 70%, or at least about 75%, or at least about 80%, or at least about 85%, or at least about 90%, or at least about 95% or more homologous to the protein encoded by the coding sequence of a Drosophila gene that, when altered in its expression, results in altered store-operated calcium entry into the cell and/or altered intracellular calcium. The particular homology can depend on the particular protein, e.g., species, that is homologous to the Drosophila gene, the extent of the encoded Drosophila protein to which the particular protein is homologous, and can also depend on the particular Drosophila gene that, when altered in its expression in a Drosophila cell, results in altered store-operated calcium entry into the cell and/or altered intracellular calcium. In particular embodiments, the protein is at least 52% or more homologous to the protein encoded by the coding sequence of the Drosophila gene. Such exemplary proteins may be homologous to the specified Drosophila protein over at least about 25%, or at least about 30%, or at least about 35%, or at least about 40%, or at least about 45%, or at least about 50%, or at least about 54%, or least about 55%, or at least about 60%, or at least about 65%, or at least about 70%, or at least about 75%, or at least about 80%, or at least about 85%, or at least about 90%, or at least about 95% or more of the protein encoded by the coding sequence of the Drosophila gene. In particular embodiments, the protein is homologous to the Drosophila protein over at least about 54% or more of the protein encoded by the coding sequence of the Drosophila gene.

[0411] In another particular embodiment of the above methods, the protein is at least about 52% homologous over at least about 54% of the protein encoded by the coding sequence of the Drosophila gene that, when altered in its expression, results in altered store-operated calcium entry into the cell and/or altered intracellular calcium.

[0412] In another embodiment of the methods for treating a disease or disorder, the agent being administered is one that modulates the level and/or activity of a protein homologous to a protein encoded by the coding sequence of Drosophila gene CG4536 or CG5842 as described throughout the disclosure herein. In particular embodiments of the methods for treating diseases and disorders involving calcium dyshomeostasis or altered intracellular calcium regulation, the agent administered to the subject is one that modulates the level and/or activity of a protein involved in modulation of intracellular calcium that has an amino acid sequence that is at least about 20%, or at least about 25%, or at least about 30%, or least about 35%, or at least about 40%, or at least about 45%, or at least about 50%, or at least about 52%, or at least about 55%, or at least about 60%, or at least about 65%, or at least about 70%, or at least about 75%, or at least about 80%, or at least about 85%, or at least about 90%, or at least about 95% or more homologous to an amino acid sequence of the protein encoded by the coding sequence of at least Drosophila gene CG4536 or CG5842. The particular homology can depend on the particular protein, e.g., species, that is homologous to the protein encoded by the Drosophila gene and the extent of the protein encoded by Drosophila gene to which the particular protein is homologous. In particular embodiments, the protein is at least 52% or more homologous to the protein encoded by the coding sequence of at least Drosophila gene CG4536 or CG5842. Such exemplary proteins may be homologous to the specified Drosophila protein over at least about 25%, or at least about 30%, or at least about 35%, or at least about 40%, or at least about 45%, or at least about 50%, or at least about 54%, or least about 55%, or at least about 60%, or at least about 65%, or at least about 70%, or at least about 75%, or at least about 80%, or at least about 85%, or at least about 90%, or at least about 95% or more of the protein encoded by the coding sequence of Drosophila gene CG4536 or CG5842. In particular embodiments, the protein is homologous to the Drosophila protein over at least about 54% or more of the protein encoded by the coding sequence of CG4536 or CG5842.

[0413] In particular, the protein is one that is at least about 35% homologous to the protein encoded by Drosophila gene CG4536 or CG5842 over at least about 40% of the encoded protein and that provides for store-operated calcium entry. In other embodiments the protein is homologous to the protein encoded by the Drosophila gene is at least about 35% homologous to the protein encoded by Drosophila gene CG4536 or CG5842 over at least about 50%, 51% or 52% of the encoded protein and that provides for store-operated calcium entry with a test agent or is at least about 41% homologous to the protein encoded by Drosophila gene CG4536 or CG5842 over at least about 50%, 51% or 52% of the encoded protein and that provides for store-operated calcium entry with a test agent. In other embodiments, the protein homologous to the protein encoded by the Drosophila gene is selected to be one that does not contain the contiguous sequence of amino acids EWKFAR (SEQ ID 114) and/or EXD(E)CR(K)GXYXXYE (SEQ ID 115), wherein X is any amino acid and an amino acid residue in parentheses is an alternative to the residue immediately preceding it.

[0414] Exemplary proteins are a calcium transport protein 1 (CaT protein), an ECaC protein, an epithelial calcium channel, a CaT2 protein, an olfactory channel, a stretch-activated channel protein, a vanilloid receptor-related osmotically activated channel protein, a vanilloid receptor type 1-like protein, a vanilloid receptor subtype 1 protein, a vanilloid receptor 1 protein, a vanilloid receptor-like protein, a capsaicin receptor protein, an olfactory trp C4 (OTRPC4) protein, a growth factor-regulated calcium channel protein, a transient receptor potential protein 12 (trp12), a transient receptor potential protein V3 (TRPV3), a stretch-inhibitable nonselective channel (SIC) protein. The protein that provide for store-operated calcium entry includes proteins that are components, such as subunits of a store-operated calcium channel, and includes proteins that affect, directly or indirectly, the activity, expression or level of such components. Also, the proteins can be from any source, particularly mammalian sources, and include human proteins. In other embodiments, other proteins that may be used in the methods provided herein include, but are not limited to, proteins involved in intracellular calcium modulation that are substantially homologous to the above-listed proteins. In other embodiments, other proteins that may be used in the methods provided herein include, but are not limited to, proteins involved in intracellular calcium modulation that are substantially homologous to the above-listed proteins and mutant or polymorphic forms thereof.

[0415] In particular embodiments of the methods for treating diseases and disorders provided herein, the disease or disorder can be, for example, a neurodegenerative disease or disorder, e.g., Alzheimer's disease (AD), Parkinson's disease, Huntington's disease, amyotrophic lateral sclerosis (ALS), and other brain disorders caused by trauma or other insults including aging, an inflammatory disease (e.g., asthma, chronic obstructive pulmonary disease, rheumatoid arthritis, inflammatory bowel disease, glomerulonephritis, neuroinflammatory diseases, multiple sclerosis, and disorders of the immune system), cancer or other proliferative disease, kidney disease and liver disease.

[0416] 1. Diseases

[0417] Because of the important role that calcium regulation plays in many cellular processes including cellular activation, gene expression, cellular trafficking and apoptotic cell death, calcium dyshomeostasis is implicated in the many diseases and disorders involving such cellular activities. These diseases and disorders include neurological, neurodegenerative, inflammatory, liver and kidney diseases and disorders and malignancies, aging-related disorders, and sensitivity to pain and touch.

[0418] a. Neurodegenerative Diseases and Disorders

[0419] Neurodegenerative diseases and disorders include but are not limited to Alzheimer's disease (AD), Parkinson's disease, Huntington's disease, amyotrophic lateral sclerosis (ALS), and other brain disorders caused by trauma or other insults including aging.

[0420] Mechanisms associated with calcium signaling may be altered in many neurodegenerative diseases and in disorders resulting from brain injury. For example, fibroblasts or T-lymphocytes from patients with AD have consistently displayed an increase in Ca²⁺ release from intracellular stores compared to controls [Ito et al. (1994) Proc. Natl. Acad. Sci. U.S.A. 91:534-538; Gibson et al. (1996) Biochem. Biophys. ACTA 1316:71-77; Etchenberrigaray et al. (1998) Neurobiology of Disease, 5:37-45]. Consistent with these observations, mutations in presenilin genes (PS1 or PS2) associated with familial AD (FAD) have been shown to increase InsP3-mediated Ca²⁺ release from internal stores [Guo et al. (1996) Neuro Report, 8:379-383; Leissring et al. (1999) J. Neurochemistry, 72:1061-1068; Leissring et al. (1999) J. Biol. Chem. 274(46):32535-32538; Leissring et al. (2000) J. Biol. Chem. 149(4):793-797; Leissring et al. (2000) Proc. Natl. Acad. Sci. U.S.A. 97(15):8590-8593]. Furthermore, mutations in PS1 or PS2 associated with an increase in amyloidogenic amyloid β peptide generation in AD are reported to be associated with a decrease in store-operated calcium entry [Yoo et al. (2000) Neuron, 27(3):561-572].

[0421] Experimental traumatic brain injury has been shown to initiate massive disturbances in Ca²⁺ concentrations in the brain that may contribute to further neuronal damage. Intracellular Ca²⁺ may be elevated by many different ion channels including store-operated channels. It has been further shown that channel blockers may be beneficial in the treatment of neurological motor dysfunction when administered in the acute posttraumatic period [Cheney et al. (2000) J. Neurotrauma, 17(1):83-91].

[0422] b. Inflammatory Diseases and Disorders

[0423] Methods provided herein may also be used in connection with treatment of inflammatory diseases. These diseases include but are not limited to asthma, chronic obstructive pulmonary disease, rheumatoid arthritis, inflammatory bowel disease, glomerulonephritis, neuroinflammatory diseases such as multiple sclerosis, and disorders of the immune system.

[0424] The activation of neutrophils (PMN) by inflammatory mediators is partly achieved by increasing cytosolic calcium concentration ([Ca²⁺]ᵢ). Store-operated calcium influx in particular is thought to play an important role in PMN activation. It has been shown that trauma increases PMN store-operated calcium influx [Hauser et al. (2000) J. Trauma Injury Infection and Critical Care 48 (4):592-598] and that prolonged elevations of [Ca²⁺]ᵢ due to enhanced store-operated calcium influx may alter stimulus-response coupling to chemotaxins and contribute to PMN dysfunction after injury. Modulation of PMN [Ca²⁺]ᵢ through store-operated calcium channels might therefore be useful in regulating PMN-mediated inflammation and spare cardiovascular function after injury, shock or sepsis [Hauser et al. (2001) J. Leukocyte Biology 69 (1):63-68].

[0425] C. Cancer and Other Proliferative Diseases

[0426] Methods provided herein may also be used in connection with treatment of malignancies, including, but not limited to, malignancies of lymphoreticular origin, bladder cancer, breast cancer, colon cancer, endometrial cancer, head and neck cancer, lung cancer, melanoma, ovarian cancer, prostate cancer and rectal cancer. Store-operated calcium entry may play an important role in cell proliferation in cancer cells [Weiss et al. (2001) International Journal of Cancer 92 (6):877-882].

[0427] A major function of prostaglandins is to protect the gastric mucosa. Included in this function is the modulation of store-operated calcium influx in human gastric cells which plays a critical role in cell proliferation. Consequently, inhibition of prostaglandins by nonsteroidal anti-inflammatory drugs (NSAIDs) can inhibit store-operated calcium influx in gastric cells [Kokoska et al. (1998) Surgery (St Louis) 124 (2):429-437]. The NSAIDs that relieve inflammation most effectively also produce the greatest gastrointestinal damage (Canadian Family Physician, January 1998, p. 101). Thus, the ability to independently modulate store-operated calcium channels in specific cell types may help to alleviate such side effect of anti-inflammatory therapy.

[0428] d. Liver Diseases and Disorders

[0429] Methods provided herein may also be used in connection with treatment of liver diseases and disorders. These diseases and disorders include but are not limited to alcoholic liver disease, liver injury, for example, due to transplantation, hepatitis, cancer, and cirrhosis.

[0430] Store-operated calcium entry has been implicated in chronic liver disease [Tao et al. (1999) J. Biol Chem., 274(34):23761-23769] as well as transplantation injury after cold preservation-warm reoxygenation [Elimadi et al. (2001) Am J. Physiology, 281(3 Part 1):G809-G815. Chronic ethanol consumption has been shown to impair liver regeneration, in part, by modulating store-operated calcium entry [Zhang et al. (1996) J. Clin. Invest. 98(5):1237-1244].

[0431] e. Kidney Diseases and Disorders

[0432] Methods provided herein may also be used in connection with treatment of kidney diseases and disorders. Mesangial cell hyperplasia is often a key feature of such diseases and disorders. Such diseases and disorders may be caused by immunological or other mechanisms of injury, including IgAN, membranoproliferative glomerulonephritis or lupus nephritis. Imbalances in the control of mesangial cell replication also appear to play a key role in the pathogenesis of progressive renal failure.

[0433] The turnover of mesangial cells in normal adult kidney is very low with a renewal rate of less than 1%. A prominent feature of glomerular/kidney diseases is mesangial hyperplasia due to elevated proliferation rate or reduced cell loss of mesangial cells. When mesangial cell proliferation is induced without cell loss, for example due to mitogenic stimulation, mesangioproliferative glomerulonephritis can result. Data have indicated that regulators of mesangial cell growth, particularly growth factors, may act by regulating store-operated calcium channels [Ma et al. (2001) J. Am. Soc. of Nephrology, 12:(1) 47-53]. Modulators of store-operated calcium influx may aid in the treatment of glomerular diseases by inhibiting mesangial cell proliferation. The epithelial calcium channel CaT2 has also been implicated in hypercalciuria and resultant renal stone formation [Peng et al. (2000) J. Biol. Chem., 275(36):28186-28194).

[0434] 2. Agents for Treatment

[0435] Agents for use in the methods of treating a disease or disorder can be any substance or combination of substances that modulates the level and/or activity of a protein involved in modulating intracellular calcium as provided herein. Examples of agents include, but are not limited to, small organic molecules, amino acids, peptides, polypeptides, nucleotides, nucleic acids, polynucleotides, carbohydrates, lipids, lipoproteins and glycoproteins. Generally, an agent for treatment of a disease or disorder is a composition, such as a compound or combination of compounds, that when administered to a subject having a disease or disorder effectively reduces, ameliorates or eliminates a symptom or manifestation of the disease or disorder or that cures the disease or disorder. The agent can have such an effect alone or in combination with other agents, or may function to enhance a therapeutic effect of another agent. Examples of agents include nucleic acids, proteins, chemical compounds, carbohydrates or lipids.

[0436] 3. Methods of Delivering an Agent for Treatment

[0437] Agents for use in the methods of treating a disease or disorder as provided herein may be delivered to a subject using any methods known in the art or described herein. Typically, delivery of an agent involves the administration of an effective amount of agent or a pharmaceutically acceptable salt or derivatives thereof. The agent may be administered with a pharmaceutically acceptable, non-toxic, excipient, including solid, semi-solid, liquid or aerosol dosage forms.

[0438] Administration of the agent can be via a variety of modes and formulations for administering compounds to subjects. For example, the agent may be administered orally, nasally, intrabronchially, rectally, parenterally, intravascularly, transdermally (including electrotransport), or topically, in the form of a solid, semi-solid, lyophilized powder, or liquid dosage forms, such as, for example, tablets, suppositories, pills, capsules, powders, solutions, suspensions, emulsions, creams, lotions, aerosols, ointments, injectables and gels, preferably in unit dosage forms suitable for simple administration of precise dosages. The compositions typically will include a pharmaceutical carrier or excipient and an active compound (i.e., the agent or pharmaceutically acceptable salt or derivative thereof), and, in addition, may include other medicinal agents, pharmaceutical agent carriers, adjuvants and other such substances.

[0439] For oral administration, a pharmaceutically acceptable, non-toxic composition may be formed by the incorporation of excipients, such as, for example, pharmaceutical grades of mannitol, lactose, starch, magnesium stearate, sodium saccharine, talcum, cellulose, glucose, gelatin, sucrose and magnesium carbonate. Such compositions may take several forms, such as solutions, suspensions, tablets, pills, capsules, powders and sustained release formulations. The composition may contain, along with the active ingredient, a diluent, such as lactose, sucrose, dicalcium phosphate, a disintegrant, such as starch or derivatives thereof, a lubricant, such as magnesium stearate, and a binder, such as starch, gum acacia, polyvinylpyrrolidone, gelatin, cellulose and derivatives thereof.

[0440] Liquid formulations may, for example, be prepared by dissolving, dispersing an active compound (for example, about 0.1% to about 95%, or 0.1% to about 50%, or about 0.5% to about 20%) and optional pharmaceutical adjuvants in a carrier, such as water, saline, aqueous dextrose, glycerol, and ethanol, to thereby form a solution or suspension. Actual methods of preparing such dosage forms are known, or will be apparent, to those skilled in the art; for example, see Remington's Pharmaceutical Sciences, Mack Publishing Company, Easton, Pa., 15th ed., 1975.

[0441] For parenteral administration, the agent may be mixed with a carrier, such as, for example, an oily ester such as ethyl oleate and isopropyl myristate. Sterile liquid pharmaceutical compositions, solutions or suspensions can be utilized by, for example, intraperitoneal injection, subcutaneous injection, intramuscular injection or intravenously.

[0442] Transdermal administration of the agent may be conducted through the use of a patch containing the agent and a carrier that is inert to the agent, is non-toxic to the skin and allows delivery of the agent for systemic absorption into the blood stream via the skin. Carriers for transdermal absorption may include pastes, e.g., absorptive powders dispersed in petroleum or hydrophilic petroleum containing the agent with or without a carrier or a matrix containing the agent; creams and ointments, e.g., viscous liquid or semi-solid emulsions, gels and occlusive devices.

[0443] Generally, an agent is administered to achieve an amount effective for amelioration of symptoms of the disease or disorder. The dose required to obtain an effective amount may vary depending on the agent, formulation, disease or disorder, and individual to whom the agent is administered.

[0444] Determination of effective amounts may also involve in vitro assays in which varying doses of agent are administered to cells in culture and the concentration of agent effective for ameliorating some or all symptoms is determined in order to calculate the concentration required in vivo. Effective amounts may also be based in in vivo animal studies.

[0445] The following examples are included for illustrative purposes only and are not intended to limit the scope of the invention.

### EXAMPLE 1

[0446] Gene Selection

[0447] Candidate intracellular calcium-modulating proteins, and genes encoding such proteins, were selected by searching the annotated Drosophila genome database (GADFLY) (see, e.g., www.fruitfly.org or hedgehog.lbl.gov). Search criteria included annotated molecular function, protein domains containing an ion channel, and primary structures associated with ion transporters. All proteins classified as having homology to domains associated with calcium channels or as having an unknown function were then analyzed for the presence of at least six transmembrane domains by submitting each sequence to the TMpred program (www.ch.embnet.org/software/TMpred_form.html) accessed via the ExPASy Molecular Biology Server (www.expasy.ch).

[0448] Genes CG4536 and CG5842 were identified in the search as genes encoding proteins with homology to domains associate with calcium channels. Homologs of these two Drosophila gene products were identified using the ENTREZ Protein search system (accessed via http://www.ncbi.nim.nih.gov/entrez/query.fcgi?db=protein). Each Drosophila gene accession number was entered as a separate query in the ENTREZ protein search command line and, in the results page, the BLink (BLAST Link) feature was used to identify protein across taxonomy that had varying degrees of homology and identity to each Drosophila gene product. The BLink feature provides a display of graphical alignments, editable taxonomic trees, conserved protein classes, protein domains, and 3D structures. A Cut-off value of 250 was used to limit the number of alignments by BLAST score to those proteins having at least 35% homology over at least 40% of the protein.

### EXAMPLE 2

[0449] Silencing of Genes CG4536 and CG5842 by RNA Interference (RNAi)

[0450] Genes CG 4536 and CG5842 were silenced in S2 cells using RNA interference and the effect monitored on store-operated calcium entry. Cells contacted with each set of RNAi reagents were tested for effects on basal cytosolic calcium levels, vehicle induced calcium entry (DMSO control), or thapsigargin induced calcium entry.

[0451] RNAi Protocol

[0452] Cell Culture

[0453] S2 cells (Invitrogen) were propagated in Drosophila expression system (DES) media (Invitrogen) supplemented with 12.5% FBS, and 200 U/L penicillin/streptomycin. Cells were plated at a density of 1×10⁶ cells/ml until they became ˜90% confluent in a 75-cm² T-flasks. Cells were incubated at 22° C.

[0454] dsRNA Production

[0455] DNA templates (approximately 700 bp in length) corresponding to the target genes were purified from bacterial stocks (ESTAT26581 for CG4536 and BAC 37.J.22 for CG 5842, from BACPAC Resources, CHORI, Oakland, Calif.) using the Qiagen miniprep system following manufacturers protocols. The target probes were PCR amplified using the EXPAND Long Template PCR system (Roche) as per manufacturer's protocols with the following primers. Each primer used for PCR amplification contained a 5′ T7 RNA polymerase binding site (GAATTAATACGACTCACTATAGGGAGA) (SEQ ID NO: 101) followed by sequences specific for the targeted genes.

| | |
|---|---|
| CG4536 | |
| Upper Primer (T7-162) (44-mer) | |
| GAA TTA ATA CGA CTC ACT ATA GGG AGA CAA CTC GGG CGG ACT GA | (SEQ ID NO:102) |
| Lower Primer (T3-647) (38-mer) | |
| AAT TAA CCC TCA CTA AAG GGA GA TCT TGG CCG GAT TCG | (SEQ ID NO:103) |
| CG5842 | |
| Upper Primer (T7-1010) (43-mer) | |
| GAA TTA ATA CGA CTC ACT ATA GGG AGA AAC GGG AGA TCT ATT G | (SEQ ID NO:104) |
| Lower Primer (T3-1464) (40-mer) | |
| ATT TAA CCC TCA CTA AAG GGA GA CTG CCA TAA TAC GAA GC | (SEQ ID NO:105) |

[0456] Double stranded RNA (dsRNA) was generated using the T7 Megascript and T3 Megascript Kits (Ambion, Austin, Tex.). Duplex RNA was achieved by heating equivalent amounts of sense and antisense stands to 65° C. for 30 minutes and then slow cooling to room temperature. The concentration of dsRNA was determined by spectrophotometry (optical density at 260 nm). Double stranded RNA was stored at −20° C.

[0457] Conditions for RNAi in Drosophila Cell Culture Drosophila cell culture cells were diluted to a final concentration of 1×106 cells/ml in DES serum free medium. Six milliliters of cells were plated in a 75 cm² T-flask. dsRNA was added directly to the media to an approximate final concentration of 37 nM and mixed by agitation. The cells were incubated for 30 min at room temperature followed by addition of 12 ml of heat inactivated FBS-supplemented DES media. The cells were incubated for an additional 5 days to allow for turnover of the target protein.

[0458] Cell Extract Preparation

[0459] Cells were harvested by trituration and pelleted by centrifugation at 1000×g. Cells were lysed in 400 μl RIPA buffer (50 mM Tris, pH 8.0; 150 mM NaCl; 1.0% Nonidet P-40; 0.5% Deoxycholate; 0.1% SDS; 0.2 mM NaVO4; 10 mM NaF; 0.4 mM EDTA; 10% glycerol). Lysed cells were centrifuged at 13,000 g for 30 min at 4° C. to pellet cell debris. The supernatant containing the whole cell extract was stored at −20° C.

[0460] Analysis of gene silencing by western blot and RT-PCR For control experiments, RNAi mediated gene silencing of peanut (GenBank accession no. P40797; G1730352; see SEQ ID NO: 99 for nucleotide sequence and SEQ ID NO: 100 for an amino acid sequence) was monitored using western blot analysis (Clemens et al. (1996) J. Biol.

[0461] Chem. 271:17002-17005) and RT-PCR to determine the extent of gene silencing. For calcium channel experiments, RT-PCR was utilized to monitor gene silencing since the target genes of interest are all novel and presently there are no reagents available to detect the protein products by western blot.

[0462] MONITORING CCE IN S2 CELLS AFTER Silencing of SOC Gene Candidates by RNA Interference (RNAi)

[0463] CCE was monitored by the methods described in Example 3 and cells were plated into a 96-well plate on day 4 of the RNAi protocol.

### EXAMPLE 3

[0464] Measurement of Cytosolic Calcium

[0465] Control cells and cells subjected to RNAi for the silencing of CG4536 and CG5842 were analyzed for possible effects of gene silencing on cytosolic calcium. Specifically, basal cytosolic calcium levels and store-operated calcium entry into the cells were evaluated using a fluorescence-based assay.

[0466] Monitoring CCE in Cells

[0467] CCE channels have specific pharmacological characteristics that are distinct from other ion channels. CCE channels are activated in response to depletion of intracellular calcium stores distinguishing them from other ion channels such as voltage gated channels. CCE can, therefore, be monitored by using store depletion to monitor channel activity. Passive or active store depletion may be used to monitor CCE channel activity. Passive intracellular store depletion can be achieve using a buffering agent such as EGTA or chelator such as TPEN. Active intracellular Ca2+ store depletion can be achieved using inositol-1,4,5-triphosphate (InsP₃) to release Ca²⁺ from the stores directly, or thapsigargin or thapsigargin like compounds such as ionomycin, BHQ, and cyclopiazonic acid may be used to deplete Ca²⁺ from the stores.

[0468] FLUO-4 Assay Protocol in S2 Cells

[0469] Although the following assay has been carried out with S2 cells, the FLUO-4 assay is a routine assay that may be modified for many different cell types.

[0470] S2 cells were seeded in a 96-well plate at a density of 100,000 cells/well (100 μl of 10⁶ cells/ml stock) and allowed to incubate at 22° C. for 1 day. The following day, the media was removed and cells were washed with 2 mM Ca²⁺ buffer (120 mM NaCl, 5 mM KCl, 4 mM MgCl-6H₂O, 2 mM CaCl₂-2H₂O, 10 mM HEPES, pH 7.4). Cells were loaded with 50 μl 10 μM FLUO-4 dye (a CA²⁺-sensitive fluorescent dye) and incubated for 60 minutes at room temperature in the dark. The dye was removed and cells were washed with Ca²⁺ free buffer (120 mM NaCl, 5 mM KCl, 4 mM MgCl-6H₂O, 10 mM HEPES, pH 7.4). Cells were then incubated in 90 μl Ca²⁺ free buffer supplemented with 2.5 mM probenecid. Probenecid inhibits the multidrug resistance transporter, which otherwise would transport loaded dye out of the cell.

[0471] Fluorescence of the dye-loaded cells was measured using an excitation wavelength of 485 nm and an emission wavelength of 510 nm on a FluoroSkan fluorimeter (Lab Systems). An Fmax and total fluorescence were measured for each well. The Fmax is the fluorescence of lysed cells that is measured 10 minutes after adding 10 μl of 1% Triton X-100 to each well. The Fmax provides a measure of the relative amount of dye loaded in each well of the 96-well plate, and is proportional to the total number of cells in each well. By taking Fmax into account, any differences in fluorescence of different wells due to well-to-well variability that may arise during the plating procedure can be factored out of the analysis. Total fluorescence is the absolute fluorescence of a well.

[0472] An initial reading of basal fluorescence was determined using an excitation wavelength of 485 nm and an emission wavelength of 510 nm on a FluoroSkan fluorimeter (Lab Systems). Cells were then incubated with either 10 μl of 0.1% DMSO (control) or 10 μl of 10 μM thapsigargin for 5 minutes at room termperature. Thapsigargin acts to inhibit the ER Ca²⁺ pump and discharges intracellular Ca 2+stores. In the absence of external Ca²⁺, thapsigargin elicits a transient elevation in intracellular free Ca²⁺ concentration ([Ca²⁺]ᵢ), which is believed to result from release of stored Ca²⁺ followed by removal or buffering of Ca²⁺ back to prestimulation levels. Ten microliters of 20 mM Ca²⁺ buffer (120 mM NaCl, 5 mM KCl, 4 mM MgCl-6H₂O, 20 mM CaCl₂-2H₂O, 10 mM HEPES, pH 7.4) was added and the cells were incubated for 3 minutes at room temperature. Calcium influx was monitored by reading fluorescence as described above.

[0473] Evaluation of Basal Cytosolic Calcium

[0474] Initial basal, resting calcium levels were determined by measuring the fluorescence of the wells prior to adding any type of agent (e.g., store-depletion agent) or manipulating the medium (e.g., altering the calcium concentration of the medium) in order to evaluate store-operated calcium entry as described below. To determine basal calcium levels, the total fluorescence of a well was divided by the Fmax for that well. The total fluorescence/Fmax values of different wells containing control cells and cells subjected to RNAi to silence gene expression were compared.

[0475] The results of these comparisons revealed that the basal, resting cytosolic calcium levels of S2 cells on day 4 after treatment with dsRNA corresponding to the gene sequence were 150% greater than the resting cytosolic calcium levels of control cells. These results identify the protein encoded by the gene as a protein involved in the modulation of intracellular calcium.

[0476] Evaluation of Store-Operated Calcium Entry

[0477] Store-operated calcium channels have specific pharmacological characteristics that are distinct from other ion channels. Store-operated calcium channels are activated in response to depletion of intracellular calcium stores, which is one feature that distinguishes them from other ion channels such as voltage-gated channels. Store-operated calcium entry can, therefore, be monitored by using store depletion to activate channel activity. Passive or active store depletion may be used to activate store-operated channel activity. Passive intracellular store depletion can be achieved using a buffering agent such as EGTA or chelator such as TPEN. Active intracellular Ca²⁺ store depletion can be achieved using inositol-1,4,5-triphosphate (InsP₃) to release Ca²⁺ from the stores directly. Thapsigargin or thapsigargin-like compounds and compounds such as ionomycin, BHQ, and cyclopiazonic acid may also be used to actively deplete Ca²⁺ from intracellular stores.

[0478] Store-operated calcium entry into S2 cells was evaluated in terms of cytosolic calcium levels determined by measuring the fluorescence of the wells after addition of a store-depletion agent. Cells were incubated with either 10 μl of 0.1% DMSO (control) or 10 μl of 10 μM thapsigargin for 5 minutes at room temperature. Thapsigargin acts to inhibit the ER Ca²⁺ pump and discharges intracellular Ca²⁺ stores. In the absence of external Ca²⁺, thapsigargin elicits a transient elevation in cytosolic free Ca²⁺ concentration ([Ca²⁺]ᵢ), which is believed to result from release of stored Ca²⁺, followed by removal or buffering of cytosolic Ca²⁺ back to prestimulation levels. Ten microliters of 20 mM Ca²⁺ buffer (120 mM NaCl, 5 mM KCl, 4 mM MgCI-6H₂O, 20 mM CaCl₂-2H₂O, 10 mM HEPES, pH 7.4) was then added to the cells which were incubated for 3 minutes at room temperature. Cytosolic calcium levels were then evaluated by measuring fluorescence of the wells (both total fluorescence and Fmax) as described above.

[0479] To evaluate any cytosolic calcium level increases due to store-operated entry of calcium into the cell from the extracellular medium independently of any increased basal cytosolic calcium levels, the basal fluorescence (measured as described above) was subtracted from the total fluorescence measured after treatment with thapsigarin and incubation in calcium-containing medium. The adjusted fluorescence value was then divided by Fmax for the particular well. These manipulations distinguish an effect on basal calcium from an effect on store-operated calcium entry (i.e., thapsigargin-dependent calcium entry).

### EXAMPLE 4

[0480] In Vitro Screening for Agents that Modulate Intracellular Calcium

[0481] Cells that contain one or more proteins involved in intracellular calcium modulation, such as the protein encoded by Drosophila gene CG4536 and CG5842 proteins homologous thereto are used to screen for agents that modulate intracellular calcium.

[0482] Transfection

[0483] Untransfected cells as well as recombinant or transfected cells can be used with any of the methods and process described herein. For generation of recombinant cells, any methods known to those of skill in the art for the insertion of DNA fragments into a vector may be used to construct expression vectors containing nucleic acid encoding an intracellular calcium-modulating protein, and appropriate transcriptional/translational control signals and/or other protein-encoding sequences. Other protein-encoding sequences include nucleic acids encoding ancillary proteins involved in the store-operated calcium entry pathway or calcium homeostasis in general. DNA inserts may include in vitro recombinant DNA and synthetic techniques and in vivo recombinants (genetic recombination).

[0484] Nucleic acid encoding an intracellular calcium-modulating protein may be introduced into host cells using a variety of procedures which are known in the art and desribed herein. Transfection methods include, but are not limited to, lipid-mediated transfer and calcium phosphate precipitation; however, the particular procedure used will depend in part on the host cell. Examples of particular transfection procedures include direct uptake using calcium phosphate [CaPO₄; see, e.g., Wigler et al. (1979) Proc. Natl. Acad. Sci. U.S.A. 76:1373-1376], polyethylene glycol [PEG]-mediated DNA uptake, electroporation, lipofection [see, e.g., Strauss (1996) Meth. Mol. Biol. 54:307-327], microcell fusion [see, e.g., Lambert (1991) Proc. Natl. Acad. Sci. U.S.A. 88:5907-5911; U.S. Pat. No. No. 5,396,767, Sawford et al (1987) Somatic Cell Mol. Genet. 13:279-284; Dhar et al. (1984) Somatic Cell Mol. Genet. 10:547-559; and McNeill-Killary et al. (1995) Meth. Enzymol. 254:133-152], lipid-mediated carrier systems [see, e.g., Teifel et al. (1995) Biotechniques 19:79-80; Albrecht et al. (1996) Ann. Hematol. 72:73-79; Holmen et al. (1995) In Vitro Cell Dev. Biol. Anim. 31:347-351; Remy et al. (1994) Bioconjug. Chem. 5:647-654; Le Bolch et al. (1995) Tetrahedron Lett. 3:6681-6684; Loeffler et al. (1993) Meth. Enzymol. 217:599-618].

[0485] Suppression of Endogenous Intracellular Calcium-Modulating Proteins

[0486] Most cells have some amount of background intracellular calcium-modulating activity. RNAi or gene knockout methods, or compounds known in the art, may be used to suppress this activity. Other methods of suppression include but are not limited to treatment with sense and anti-sense nucleotides and monoclonal antibodies. Such techniques may be accomplished in accordance with any of the known procedures for treating cells to control the production or expression of a selected protein. Such techniques may be implemented prior to or after transfection of cells or may be incorporated into the transfection procedure.

[0487] Test Agent Screening Protocol

[0488] Agents to be Screened

[0489] Any agent can be screened as at test agent.

[0490] SH-SY5Y Cell Assay

[0491] In an exemplary protocol for conducting an agent screening method, human neuroblastoma cells of cell line SH-SY5Y were evaluated for store-operated calcium entry using fluorescence measurement assays as follows. SH-SY5Y cells were plated in 384-well plates were loaded for 45 min with FLUO-4-AM in a Hanks-buffered salt solution. Cells were washed and placed in a nominally Ca²⁺-free Hanks solution. One minute later, 1 μM thapsigargin (TG) was added to inhibit the ER Ca²⁺ pump and discharge intracellular Ca²⁺ stores. Alternatively, store depletion may be carried out by any of the methods described herein or known in the art. Fifteen minutes after addition of TG, test compound or vehicle was added, followed by another 15 min incubation in Ca²⁺-free buffer. Store-operated calcium entry was then initiated by adding external Ca²⁺ to a final concentration of 1.8 mM and the response monitored using a FLIPR³⁸⁴ (Molecular Devices flourimetric imaging plate reader for high throughput screening) over a period of 10-15 min.

[0492] The kinetic data from the FLIPR³⁸⁴ was analyzed and then stored in a relational database (ActivityBase; IDBS). Ten quantitative parameters were calculated that define various aspects of the store-operated calcium entry response. These parameters were as follows:

[0493] Mean Basal: basal fluorescence (relative fluorescence units, RFU) readings averaged over 30 seconds prior to addition of Ca²⁺ to initiate store-operated calcium entry

[0494] Up slope: linear regression of the increase in RFU from 2 to 60 sec after addition of Ca²⁺

[0495] Up rate constant (Up K): the rate constant derived from first-order association of RFUs from 2 seconds to peak response

[0496] Peak: the peak RFU (single point) achieved after addition of Ca²+(this parameter, although calculated, is not returned to the database)

[0497] Time to peak: the time at which the peak RFU is achieved

[0498] Peak/Basal: the difference between peak and mean basal RFU

[0499] Decay slope: linear regression of the decrease in RFU from the peak to the end of the measurement period

[0500] Decay rate constant (Decay K): the rate constant derived from first-order decay of RFUs from the peak to the end of the measurement period.

[0501] Area under the curve (AUC): area under the curve from the addition of Ca²⁺ to the end of the measurement period.

[0502] Combinations of these parameters were queried to identify agents that produce at least a 50% change from control. Active agents identified from these queries were retested under identical conditions to confirm their activity. Agents with confirmed activity were then analyzed for concentration-dependent effects, and subsequently, those agents displaying concentration-dependent effects were categorized as confirmed hits.

[0503] CHO Cell Assay

[0504] CHO cells transfected with DNA encoding wild-type human APP695 and wild-type human presenilin-1 were treated in a manner similar to the SH-SY5Y cells, except that the additions were performed at different times. Cells loaded with FLUO-4, were incubated in nominally Ca²⁺-free buffer and treated with 1 μM TG for 5 minutes prior to addition of vehicle or test compound. Following a five minute incubation with compound or vehicle, store-operated calcium entry is initiated by the addition of 1.8 mM Ca²⁺.

[0505] Since modifications will be apparent to those of skill in this art, it is intended that this invention be limited only by the scope of the appended claims.

What is claimed:

1. A method of identifying an agent that modulates intracellular calcium, comprising:
contacting one or more test cells or a portion thereof comprising one or more proteins that is (are) at least about 35% homologous to the protein encoded by Drosophila gene CG4536 or CG5842 over at least about 40% of the encoded protein and that provides for store-operated calcium entry with a test agent, wherein the portion of the cell comprises the one or more proteins;
monitoring the effect(s) of the test compound on store-operated calcium entry; and
identifying a test agent as an agent if it has an effect on store-operated calcium entry.

2. The method of claim 1, wherein the portion of the cell comprises a cell membrane, a cell organelle or a cell organelle membrane.

3. The method of claim 1, wherein:
the step of monitoring the effects, comprises:
comparing store-operated calcium entry into one or more test cell(s) in the presence and absence of the test agent or comparing store-operated calcium entry into a test cell and into a control cell in the presence of the test agent, wherein:
the control cell is substantially similar cell to a test cell, but contains a different amount, including none, of the one or more proteins that is (are) at least about 35% homologous to the protein encoded by Drosophila gene CG4536 or CG5842 over at least about 40% of the encoded protein that the cell comprises; and
the step of identifying comprises identifying a test agent as an agent that modulates intracellular calcium if store-operated calcium entry into the one or more test cells differs in the presence and absence of the test agent or if store-operated calcium entry into a test cell and the control cell differs.

4. The method of claim 1, wherein:
monitoring the effect(s) of the test agent on store-operated calcium entry, comprises:
reducing the calcium level in an intracellular calcium store of one or more test cells; and
monitoring the effect of test agent on intracellular and/or extracellular a) ion movement, b) ion flux or c) ion levels of the one or more test cells; and
identifying comprises identifying a test agent as an agent if it has an effect on a), b) or c), wherein:
the step of reducing the calcium levels in an intracellular calcium store is performed before, simultaneously with or after the step of contacting one or more test cells with the test agent.

5. The method of claim 4, wherein:
monitoring the effect(s) of test agent on store-operated calcium further comprises:
comparing a), b) or c) in the presence and absence of the test agent or comparing a), b) or c) of a test cell and a control cell in the presence of the test agent; and
identifying further comprises:
identifying a test agent as an agent that modulates intracellular calcium if a), b) or c) of a test cell differ in the presence and absence of the test agent or if a), b) or c) of a test cell and the control cell differ, wherein:
a control cell is substantially similar to a test cell, but contains a different amount, including none, of the proteins that is (are) at least about 35% homologous to the protein encoded by Drosophila gene CG4536 or CG5842 over at least about 40% of the encoded protein that the test cell comprises.

6. The method of claim 4, wherein:
monitoring the effects of test agent on store-operated calcium comprises:
determining intracellular or cytoplasmic calcium levels of one or more test cells; and
identifying comprises:
identifying a test agent as an agent if it has an effect on intracellular or cytoplasmic calcium levels of one or more test cells.

7. The method of claim 6, wherein:
monitoring the effect(s) of test agent on store-operated calcium further comprises:
comparing the intracellular calcium levels of one or more test cells in the presence and absence of the test agent or the intracellular calcium levels of a test cell and of a control cell in the presence of the test agent; and
identifying comprises:
identifying a test agent as an agent that modulates intracellular calcium if the intracellular calcium levels of a test cell differ in the presence and absence of the test agent or if the intracellular calcium levels of a test cell and the control cell differ, wherein
a control cell is substantially similar to a test cell, but contains a different amount, including none, of the proteins that is (are) at least about 35% homologous to the protein encoded by Drosophila gene CG4536 or CG5842 over at least about 40% of the encoded protein that the test cell comprises.

8. The method of claim 4, wherein:
monitoring the effects of test agent on store-operated calcium comprises:
monitoring intracellular calcium levels over time in one or more test cells for fluctuations in intracellular calcium levels; and
identifying comprises:
identifying a test agent as an agent if it has an effect on intracellular calcium level time courses.

9. The method of claim 8, wherein:
monitoring the effect(s) of test agent on store-operated calcium further comprises:
comparing the intracellular calcium level time courses of a test cell in the presence and absence of the test agent or the intracellular calcium level time courses of a test cell and a control cell in the presence of the test agent; and
identifying comprises:
identifying a test agent as an agent that modulates intracellular calcium if the intracellular calcium level time courses of a test cell differ in the presence and absence of the test agent or if the intracellular calcium level time courses of a test cell and the control cell differ, wherein
a control cell is substantially similar to a test cell, but contains a different amount, including none, of the proteins that is (are) at least about 35% homologous to the protein encoded by Drosophila gene CG4536 or CG5842 over at least about 40% of the encoded protein that the test cell comprises.

10. The method of claim 4, wherein:
monitoring the effects of test agent on store-operated calcium comprises:
assessing comprises assessing ion flux across the cell plasma membrane of a test cell; and
identifying comprises:
identifying a test agent as an agent if it has an effect on ion flux across the cell plasma membrane of a test cell.

11. The method of claim 10, wherein:
monitoring the effect(s) of test agent on store-operated calcium further comprises:
comparing the ion flux across the cell plasma membrane of a test cell in the presence and absence of the test agent or the ion flux across plasma membrane of a test cell and a control cell in the presence of the test agent, wherein
a control cell is substantially similar to a test cell, but contains a different amount, including none, of the proteins that is (are) at least about 35% homologous to the protein encoded by Drosophila gene CG4536 or CG5842 over at least about 40% of the encoded protein that the test cell comprises; and
identifying further comprises identifying a test agent as an agent that modulates intracellular calcium if the ion flux across the cell plasma membrane of a test cell differs in the presence and absence of the test agent or if the ion flux across the plasma membrane of a test cell and the control cell differs.

12. The method of claim 1, wherein a protein that is at least about 35% homologous to the protein encoded by Drosophila gene CG4536 or CG5842 over at least about 40% of the encoded protein and that provides for store-operated calcium entry is selected from the group consisting of a calcium transport protein 1 (CaT protein), an ECaC protein, an epithelial calcium channel, a CaT2 protein, an olfactory channel, a stretch-activated channel protein, a vanilloid receptor-related osmotically activated channel protein, a vanilloid receptor type 1-like protein, a vanilloid receptor subtype 1 protein, a vanilloid receptor 1 protein, a vanilloid receptor-like protein, a capsaicin receptor protein, an olfactory trp C4 (OTRPC4) protein, a growth factor-regulated calcium channel protein, a transient receptor potential protein 12 (trp 12), a transient receptor potential protein V3 (TRPV3), a stretch-inhibitable nonselective channel (SIC) protein.

13. The method of claim 3, wherein a protein that is at least about 35% homologous to the protein encoded by Drosophila gene CG4536 or CG5842 over at least about 40% of the encoded protein and that provides for store-operated calcium entry is selected from the group consisting of a calcium transport protein 1 (CaT protein), an ECaC protein, an epithelial calcium channel, a CaT2 protein, an olfactory channel, a stretch-activated channel protein, a vanilloid receptor-related osmotically activated channel protein, a vanilloid receptor type 1-like protein, a vanilloid receptor subtype 1 protein, a vanilloid receptor 1 protein, a vanilloid receptor-like protein, a capsaicin receptor protein, an olfactory trp C4 (OTRPC4) protein, a growth factor-regulated calcium channel protein, a transient receptor potential protein 12 (trp12), a transient receptor potential protein V3 (TRPV3), a stretch-inhibitable nonselective channel (SIC) protein.

14. The method of claim 4, wherein a protein that is at least about 35% homologous to the protein encoded by Drosophila gene CG4536 or CG5842 over at least about 40% of the encoded protein and that provides for store-operated calcium entry is selected from the group consisting of a calcium transport protein 1 (CaT protein), an ECaC protein, an epithelial calcium channel, a CaT2 protein, an olfactory channel, a stretch-activated channel protein, a vanilloid receptor-related osmotically activated channel protein, a vanilloid receptor type 1-like protein, a vanilloid receptor subtype 1 protein, a vanilloid receptor 1 protein, a vanilloid receptor-like protein, a capsaicin receptor protein, an olfactory trp C4 (OTRPC4) protein, a growth factor-regulated calcium channel protein, a transient receptor potential protein 12 (trp12), a transient receptor potential protein V3 (TRPV3) and a stretch-inhibitable nonselective channel (SIC) protein.

15. The method of any of claims 1-10, wherein a protein that is homologous to the protein encoded by the Drosophila gene is at least about 35% homologous to the protein encoded by Drosophila gene CG4536 or CG5842 over at least about 50%, 51% or 52% of the encoded protein and that provides for store-operated calcium entry with a test agent.

16. The method of any of claims 1-10, wherein a protein that is homologous to the protein encoded by the Drosophila gene is at least about 41% homologous to the protein encoded by Drosophila gene CG4536 or CG5842 over at least about 50%, 51% or 52% of the encoded protein and that provides for store-operated calcium entry with a test agent.

17. The method of any of claims 1-10, wherein a protein homologous to the protein encoded by the Drosophila gene does not contain the contiguous sequence of amino acids EWKFAR (SEQ ID 114) and/or EXD(E)CR(K)GXYXXYE (SEQ ID 115), wherein X is any amino acid and an amino acid residue in parentheses is an alternative to the residue immediately preceding it.

18. A method of identifying an agent that modulates intracellular calcium, comprising:
monitoring the effects of an agent on store-operated calcium entry, wherein the agent modulates the activity of, the interaction of, the level of or binds to a protein that provides for store-operated calcium entry and that is at least about 35% homologous to the protein encoded by Drosophila gene CG4536 or CG5842 over at least about 40% of the encoded protein; and
identifying a test agent as an agent that modulates intracellular calcium if it has an effect on store-operated calcium entry.

19. The method of claim 18, wherein the effect on store-operated calcium entry is tested on a test cell or a portion thereof that comprises the protein that is at least about 35% homologous to the protein encoded by Drosophila gene CG4536 or CG5842 over at least about 40% of the encoded protein and that provides for store-operated calcium entry.

20. The method of claim 19, wherein:
the step of monitoring the effects, comprises:
comparing store-operated calcium entry into one or more test cell(s) in the presence and absence of the test agent or comparing store-operated calcium entry into a test cell and into a control cell in the presence of the test agent, wherein:
the control cell is substantially similar cell to a test cell, but contains a different amount, including none, of the one or more proteins that is (are) at least about 35% homologous to the protein encoded by Drosophila gene CG4536 or CG5842 over at least about 40% of the encoded protein that the cell comprises; and
the step of identifying comprises identifying a test agent as an agent that modulates intracellular calcium if store-operated calcium entry into the one or more test cells differs in the presence and absence of the test agent or if store-operated calcium entry into a test cell and the control cell differs.

21. The method of claim 19, wherein:
monitoring the effect(s) of the test agent on store-operated calcium entry, comprises:
reducing the calcium level in an intracellular calcium store of one or more test cells; and
monitoring the effect of test agent on intracellular and/or extracellular a) ion movement, b) ion flux or c) ion levels of the one or more test cells; and
identifying comprises identifying a test agent as an agent if it has an effect on a), b) or c), wherein:
the step of reducing the calcium levels in an intracellular calcium store is performed before, simultaneously with or after the step of contacting one or more test cells with the test agent.

22. The method of claim 21, wherein:
monitoring the effect(s) of test agent on store-operated calcium further comprises:
comparing a), b) or c) in the presence and absence of the test agent or comparing a), b) or c) of a test cell and a control cell in the presence of the test agent, wherein
a control cell is substantially similar to a test cell, but contains a different amount, including none, of the proteins that is (are) at least about 35% homologous to the protein encoded by Drosophila gene CG4536 or CG5842 over at least about 40% of the encoded protein that the test cell comprises; and
identifying further comprises:
identifying a test agent as an agent that modulates intracellular calcium if a), b) or c) of a test cell differ in the presence and absence of the test agent or if a), b) or c) of a test cell and the control cell differ, wherein:
a control cell is substantially similar to a test cell, but contains a different amount, including none, of the proteins that is (are) at least about 35% homologous to the protein encoded by Drosophila gene CG4536 or CG5842 over at least about 40% of the encoded protein that the test cell comprises.

23. The method of claim 19, wherein:
monitoring the effects of a test agent on store-operated calcium comprises:
determining intracellular or cytoplasmic calcium levels of one or more test cells; and
identifying comprises:
identifying a test agent as an agent if it has an effect on intracellular or cytoplasmic calcium levels of one or more test cells.

24. The method of claim 23, wherein:
monitoring the effect(s) of test agent on store-operated calcium further comprises:
comparing the intracellular calcium levels of one or more test cells in the presence and absence of the test agent or the intracellular calcium levels of a test cell and of a control cell in the presence of the test agent, wherein
a control cell is substantially similar to a test cell, but contains a different amount, including none, of the proteins that is (are) at least about 35% homologous to the protein encoded by Drosophila gene CG4536 or CG5842 over at least about 40% of the encoded protein that the test cell comprises; and
identifying comprises:
identifying a test agent as an agent that modulates intracellular calcium if the intracellular calcium levels of a test cell differ in the presence and absence of the test agent or if the intracellular calcium levels of a test cell and the control cell differ.

25. The method of claim 19, wherein:
monitoring the effects of test agent on store-operated calcium comprises:
monitoring intracellular calcium levels over time in one or more test cells for fluctuations in intracellular calcium levels; and
identifying comprises:
identifying a test agent as an agent if it has an effect on intracellular calcium level time courses.

26. The method of claim 25, wherein:
monitoring the effect(s) of test agent on store-operated calcium further comprises:
comparing the intracellular calcium level time courses of a test cell in the presence and absence of the test agent or the intracellular calcium level time courses of a test cell and a control cell in the presence of the test agent, wherein
a control cell is substantially similar to a test cell, but contains a different amount, including none, of the proteins that is (are) at least about 35% homologous to the protein encoded by Drosophila gene CG4536 or CG5842 over at least about 40% of the encoded protein that the test cell comprises; and
identifying comprises:
identifying a test agent as an agent that modulates intracellular calcium if the intracellular calcium level time courses of a test cell differ in the presence and absence of the test agent or if the intracellular calcium level time courses of a test cell and the control cell differ.

27. The method of claim 31, wherein:
monitoring the effects of test agent on store-operated calcium comprises:
assessing comprises assessing ion flux across the cell plasma membrane of a test cell; and
identifying comprises:
identifying a test agent as an agent if it has an effect on ion flux across the cell plasma membrane of a test cell.

28. The method of claim 27, wherein:
monitoring the effect(s) of test agent on store-operated calcium further comprises:
comparing the ion flux across the cell plasma membrane of a test cell in the presence and absence of the test agent or the ion flux across plasma membrane of a test cell and a control cell in the presence of the test agent; and
identifying further comprises identifying a test agent as an agent that modulates intracellular calcium if the ion flux across the cell plasma membrane of a test cell differs in the presence and absence of the test agent or if the ion flux across the plasma membrane of a test cell and the control cell differs, wherein
a control cell is substantially similar to a test cell, but contains a different amount, including none, of the proteins that is (are) at least about 35% homologous to the protein encoded by Drosophila gene CG4536 or CG5842 over at least about 40% of the encoded protein that the test cell comprises.

29. The method of claim 18, wherein a protein that is at least about 35% homologous to the protein encoded by Drosophila gene CG4536 or CG5842 over at least about 40% of the encoded protein and that provides for store-operated calcium entry is selected from the group consisting of a calcium transport protein 1 (CaT protein), an ECaC protein, an epithelial calcium channel, a CaT2 protein, an olfactory channel, a stretch-activated channel protein, a vanilloid receptor-related osmotically activated channel protein, a vanilloid receptor type 1-like protein, a vanilloid receptor subtype 1 protein, a vanilloid receptor 1 protein, a vanilloid receptor-like protein, a capsaicin receptor protein, an olfactory trp C4 (OTRPC4) protein, a growth factor-regulated calcium channel protein, a transient receptor potential protein 12 (trp 12), a transient receptor potential protein V3 (TRPV3), a stretch-inhibitable nonselective channel (SIC) protein.

30. The method of claim 1 or claim 18, wherein a protein that provides for store-operated calcium entry is a mammalian protein.

31. The method of claim 30, wherein the mammalian protein is a human protein.

32. The method of claim 18 wherein a protein that is homologous to the protein encoded by the Drosophila gene is at least about 35% homologous to the protein encoded by Drosophila gene CG4536 or CG5842 over at least about 50%, 51% or 52% of the encoded protein and that provides for store-operated calcium entry with a test agent.

33. The method of claim 18, wherein a protein that is homologous to the protein encoded by the Drosophila gene is at least about 41% homologous to the protein encoded by Drosophila gene CG4536 or CG5842 over at least about 50%, 51% or 52% of the encoded protein and that provides for store-operated calcium entry with a test agent.

34. The method of claim 18, wherein a protein homologous to the protein encoded by the Drosophila gene does not contain the contiguous sequence of amino acids EWKFAR (SEQ ID 114) and/or EXD(E)CR(K)GXYXXYE (SEQ ID 115), wherein X is any amino acid and an amino acid residue in parentheses is an alternative to the residue immediately preceding it.

35. The method of claim 1 or claim 18, wherein the protein that provides for store-operated calcium entry is a component of a store-operated calcium entry channel.

36. The method of claim 1 or claim 18, wherein the proteins that is (are) at least about 35% homologous to the protein encoded by a Drosophila gene over about 40% of the encoded protein are selected from among ion transport proteins.

37. The method of claim 1 or claim 18, wherein the cell is a recombinant cell and at least one of the one or more proteins that is (are) at least about 35% homologous to a protein encoded by a Drosophila gene over about 40% of the encoded protein is heterologous to the cell.

38. The method of claims 1 or claim 18, wherein the test cell is a mammalian cell.

39. The method of claims 37, wherein the test cell is a mammalian cell.

40. The method of claim 1 or claim 18, wherein the agent is a drug for treatment of a neurodegenerative disease.

41. The method of claim 1 or claim 18, wherein a protein that is at least about 35% homologous to the protein encoded by Drosophila gene CG4536 or CG5842 over at least about 40% of the encoded protein and that provides for store-operated calcium entry is a calcium transport protein 1 (CaT protein) or an ECaC protein.

42. A method of modulating store-operated calcium entry, comprising modulating the level of, expression of, activity of or molecular interactions of a protein in a cell that has altered store-operated calcium entry, wherein the protein is at least about 35% homologous to the protein encoded by Drosophila gene CG4536 or CG5842 over at least about 40% of the encoded protein and that provides for store-operated calcium entry, and whereby store-operated calcium transport into the cell is modulated.

43. The method of claim 42, wherein a protein that is at least about 35% homologous to the protein encoded by Drosophila gene CG4536 or CG5842 over at least about 40% of the encoded protein and that provides for store-operated calcium entry is selected from the group consisting of a calcium transport protein 1 (CaT protein), an ECaC protein, an epithelial calcium channel, a CaT2 protein, an olfactory channel, a stretch-activated channel protein, a vanilloid receptor-related osmotically activated channel protein, a vanilloid receptor type 1-like protein, a vanilloid receptor subtype 1 protein, a vanilloid receptor 1 protein, a vanilloid receptor-like protein, a capsaicin receptor protein, an olfactory trp C4 (OTRPC4) protein, a growth factor-regulated calcium channel protein, a transient receptor potential protein 12 (trp12), a transient receptor potential protein V3 (TRPV3), a stretch-inhibitable nonselective channel (SIC) protein.

44. The method of claim 43, wherein the protein is a CaT1 or EcAc protein.

45. A method of identifying a molecule that provides for store-operated calcium entry, comprising identifying a molecule that interacts with a protein that is least about 35% homologous to the protein encoded by Drosophila gene CG4536 or CG5842 over at least about 40% of the encoded protein and that provides for store-operated calcium entry, thereby identifying molecules involved in modulating store-operated calcium entry.

46. The method of claim 45, further comprising eliminating, altering or reducing the expression of a gene encoding the protein in a cell and evaluating intracellular calcium.

47. The method of claim 45, wherein the protein that is least about 35% homologous to the protein encoded by Drosophila gene CG4536 or CG5842 over at least about 40% of the encoded protein is a mammalian protein.

48. The method of claim 46, wherein the cell in which intracellular calcium is evaluated is a mammalian cell.

The application's sequence listing, which the Patent Office published only in electronic form, follows.

SEQUENCE LISTING (115 sequences)

SEQ ID NO: 1 - DNA, 3372 bp, Drosophila melanogaster
  CDS (1)...(3369)
  ref <308>: DATABASE ACCESSION NUMBER: Genbank AAF46203
  ref <309>: DATABASE ENTRY DATE: 2002-09-13
atgaagttcctcctgaagaaatgcctgcgcaagaaggcgcccgagatgaaacccggggccatcctggatgccgtcatctcgcaatcatcggccaccgcgtgcaagtgcctgctgtacaaactggcggattacaaaagaggtggtgatctcatcgatgccatcaactcgggcggactgattgccgtggagcagctgatccgggagcagtttggcgtcttcatgtacaacgatggcaagggccaggtgataaaccgtgctgagtttctgcgctggaagtaccgcgaccacaccgaggtgaccatacccattgaggcatccctgtccatccacgatccgctgggcaaatgggaggaccacaaggcctgctggcagatgcagtaccgcggcgccctgggcgagagtctgctccatgtgctcatcatctgcgattccaaggtgcacaccaagttggcgcgcgtgctgctccgcgtgttccccaatctggcgctggatgtgatggagggcgaggagtatctgggtgctagtgccctgcacctgtcgattgcctacagcaacaatgagctggtggcggatctgatcgaggccggagcggatatccatcagcgagcgattggtagcttctttctgccacgtgaccaacagcgagcgaatccggccaagagcaccgactacgagggactggcctacatgggtgaatatccgctggcttgggccgcctgctgtgccaacgagagtgtctacaacctgctggtggactgcggatccgatccggatgcccaggactccttcggcaatatgatcctgcacatggtggtcgtgtgcgacaaactggacatgttcggctatgccctgcgacatcccaagacgccggccaagaatggcattgtcaaccagacgggactgactccactcactctggcctgcaagctgggacgggcggaggtctttcgtgaaatgttggagctgtccgcccgcgagttttggcgctacagtaacatcacctgttccggctatccactgaatgcactggacactcttctgccggacggaaggactaattggaattccgccttgttcatcattctgaacggcaccaagccggagcatctggacatgttggacggcggcattatccagcgcctgctggaggagaagtggaagacctttgcgcagaaccagtttctgaagcgtctgctcatcctgtccacccatctgctatgcctgtccgtatcggtgtatttgcgtccagcgcacgatggtgaagccgaggatgaggactccgagggatcggatgcctcggcagccgctctgctggacatacagtcggatgagggcgacagtggtggtggtgactacaatgcccagacggtggcccgttactgcgccgagtttgccaccctggtgggagttttaagctatgtgatcttccagcaaggcgacgagataaagaaccagggtttgtccgcctttctcaagcagctgtcccatgcgccggctaaggccatcttcctgttctccaacttgctgatcctggcgtgcattccatttcgtttgattggcgacaccgataccgaggaggccatcctgattttcgctgtgccgggctcctggtttctcctaatgttctttgctggtgccattcggctgacgggtccgtttgtgaccatgatctattccatgatcacgggcgacatgttcaccttcggcatcatctactgcatcgtcctgtgcggattctcgcaggccttctacttcctctacaagggacatccccaggtgcagtccaccatgttcaatacctacaccagcacttggatggccctgttccaaaccacactgggtgattataactatcccgatctcaatcagaccacatatcccaatctctccaagaccgtgtttgtcatctttatgatcttcgtacccatcctgttgctcaacatgttgattgccatgatgggcaacacctatgtgactgtgatcgagcagtcggagaaggaatggatgaagcagtgggccaagattgtcgtcaccctggagcgcgctgttccgcaggcggatgccaagggctatctggaggcatactccatcccgctgggtccgtccgatgactccggtttcgaagtgcgcggcgtgatggtcatcaagagcaagagcaagacgagggccaagcagcgaaaaggagccgtctccaactggaagcgcgtgggtcgtgtgacgctaacggcgctcaagaaacgcggaatgaccggcgaggagatgcgtcgccttatgtggggccgtgcctccatctccagtcccgtgaaagtgacgaagcagaagcttaaggatccctacaatctgcacacggactccgacttcaccaacgccatggacatgctgaccttcgctagcaacccggcttcctccaatggcgtcaccctgcgatcggtaacagcgcctccgcccgcaccgccagcaccggatcccttcagggagctgatcatgatgtcggaccagcgaccggagacccatgatccccactactttgccggcctgcagcagctggccaataaggctttcgatttggtggagcaaacgatgaagacacagccgcaagcgccggtggccaagaaggtggatccactgccagtggcttcggtggccaaagcatctccagccgctcctgcaacacaagctactgctactgctgctgctgcttccgatctaatggccatgccactgcccatttcgaacttgagcaatcttttccaagaccccaaggacattgtcgatcccaaaaagctggaggagttcatggccatgctggccgaggtggaaaccgaggagagcgacagcggcggacccattctcggcaagctatcgctggccaaacggacacacaatgccctatccaaggcggaaattcgacgggatcagcagggattcgagggtcacagccatggacagtttcagcccatgtcctcggtgtgggcaccacctggcctggatgtggacacgggcttccacttcgatgaagccgtcgcggaggaggtgctgaccatcgaacaggaagccgaagtggagaccgaggacggcaatggtggacaggacagcgaggatatacccacggcggaggaggtgcacgccactatgaagcagtttcacctgcgcaagtgccagccagcacaggatgaggccgctcgtcgcgccaaaagtgctcgtgttcgtcgccgaaacaaagtttcgccggagcaaagcgatgatccggacgagcgcagccagcggggacgttccgcttacacgcggcgaacgcaatcgccgcccgatccgctggaaccatggagcacccgcgaactgcaggacatcaacaagatcctggccagaaagtga

SEQ ID NO: 2 - protein, 1123 aa, Drosophila melanogaster
  ref <308>: DATABASE ACCESSION NUMBER: Genbank AAF46203
  ref <309>: DATABASE ENTRY DATE: 2002-09-13
MKFLLKKCLRKKAPEMKPGAILDAVISQSSATACKCLLYKLADYKRGGDLIDAINSGGLIAVEQLIREQFGVFMYNDGKGQVINRAEFLRWKYRDHTEVTIPIEASLSIHDPLGKWEDHKACWQMQYRGALGESLLHVLIICDSKVHTKLARVLLRVFPNLALDVMEGEEYLGASALHLSIAYSNNELVADLIEAGADIHQRAIGSFFLPRDQQRANPAKSTDYEGLAYMGEYPLAWAACCANESVYNLLVDCGSDPDAQDSFGNMILHMVVVCDKLDMFGYALRHPKTPAKNGIVNQTGLTPLTLACKLGRAEVFREMLELSAREFWRYSNITCSGYPLNALDTLLPDGRTNWNSALFIILNGTKPEHLDMLDGGIIQRLLEEKWKTFAQNQFLKRLLILSTHLLCLSVSVYLRPAHDGEAEDEDSEGSDASAAALLDIQSDEGDSGGGDYNAQTVARYCAEFATLVGVLSYVIFQQGDEIKNQGLSAFLKQLSHAPAKAIFLFSNLLILACIPFRLIGDTDTEEAILIFAVPGSWFLLMFFAGAIRLTGPFVTMIYSMITGDMFTFGIIYCIVLCGFSQAFYFLYKGHPQVQSTMFNTYTSTWMALFQTTLGDYNYPDLNQTTYPNLSKTVFVIFMIFVPILLLNMLIAMMGNTYVTVIEQSEKEWMKQWAKIVVTLERAVPQADAKGYLEAYSIPLGPSDDSGFEVRGVMVIKSKSKTRAKQRKGAVSNWKRVGRVTLTALKKRGMTGEEMRRLMWGRASISSPVKVTKQKLKDPYNLHTDSDFTNAMDMLTFASNPASSNGVTLRSVTAPPPAPPAPDPFRELIMMSDQRPETHDPHYFAGLQQLANKAFDLVEQTMKTQPQAPVAKKVDPLPVASVAKASPAAPATQATATAAAASDLMAMPLPISNLSNLFQDPKDIVDPKKLEEFMAMLAEVETEESDSGGPILGKLSLAKRTHNALSKAEIRRDQQGFEGHSHGQFQPMSSVWAPPGLDVDTGFHFDEAVAEEVLTIEQEAEVETEDGNGGQDSEDIPTAEEVHATMKQFHLRKCQPAQDEAARRAKSARVRRRNKVSPEQSDDPDERSQRGRSAYTRRTQSPPDPLEPWSTRELQDINKILARK

SEQ ID NO: 3 - DNA, 2253 bp, Drosophila melanogaster
  CDS (1)...(2250)
  ref <308>: DATABASE ACCESSION NUMBER: Genbank AAF49752
  ref <309>: DATABASE ENTRY DATE: 2002-09-17
atggggaatacggagagcaatgttaccagcggggtgaagaagcaggccggagtctccacccaggctctatacaagttcgtgaatctcaagggcggtggactcctggtggacatgatgaaaagagcctgtcaaaccaaacagtttgctgagatcgatcatgctatcaaaaccaaagtggagccctttctgtacaacaagggcgctggacggtattttcccatctcgaagctcgtactgctgcgaaatcgggatcgcccacgcactcgccaattgcccgagatccgagccctcgagaatcctgacgacgatttcaacatccatgactactgccccgaggtttcggaggccgagtatatctccaatcctacggcctatcgattcgtctgctgggatcttaatatgcgtggcgctgtgggcgaaactattctccatttgtgcctgctaaatgcatcttccttgcacgcagatctcgccaaaagattgctaaaattctacccgaaactcatcctggacatttacatgagcgacgagtattatggagagagtgtcctgcacattgccatcgtcaatgaagatccggcaatggtgaagtatctgctggatgccaacgcagatgttcaagagcggtgctgtggagccttcatgtcggcggaggatactaagttttctcgcacggattcgccggatcacgagtatgtggcactttgtcccatgaccaactacgatggttatgtttactggggagaatacccattgagttttgccgcttgcctgtcgcaggaggagtgcttccgcttagttttggccagaggtgccgatcccgacttccaggacaccaacggaaacaccgttctccacatgctggtcatttacgaaaagatcgaaatgttcgatgttggctacgaggttggaacaaacatacacataaaaaacattcagaatctcacgccccttactttggcggccaagttgggcagagttgagatgttcttccacgtgatgagcatcgaacgggagatctattggcaattgggtagcatcacatgtgccgcatatccgcttttgatgatagacactataaatgaggaaaccggcaatatcaacaaggactccgtgctgaactttgtggtatttggcgataagctggagcacttggagctgctagatggggtggtcatagatctgctaaagaccaaatgggacacgttctgcaaatcgcgattttacaagcaattttacatgttcgccctctactttctcatctcgctgttcagttttatactgcgtccaggtccggatgccaaggacgaagacgaggatggcgccaatagcactacggctaaaaaaacattttggcttaattttactgagtactacgatccatcggaagttgaggtcctgcccgcctggtgggaaagttatgctcagtgtcctttgatgaatctcgaatccgatttggccaagcttcgtattatggcagaactgttgaattttgtaggagctatcctgtatctgctggttgctttgcgagaagctcgattcctgggccttaaaatgtttatcgaaaacttggcaatgatgatataccgcatggtcatgggagatctgctccgattcgtctccatctacttggtgttcgtcatgggtttctcccaggcattttacataatttttctaaccttcgacaacccatcgtcaccagaggatcaggacgcggaatccaacccaatgccctcgcccatggaatcgatagtggccatgttcctaatgtcgctaacaaatttcggtgactactatggagcgatggtgtctacgcagcacgaatacgaggcgaagatcctcttctttctgttcatggtgatcgtgagtgttctgctggtgaacatgttgatcgccatgatgggtaatacgtatcagaagatcgccgagatccgaaacgagtggcagcgccaatgggccaggatcgtcctcgtcgtggagcgaagtgttcctcccgccgagcggttgaagaactttatgcagtacagtcagtcgatgtcggatggcagaagggcactggtcctccggttgaatatgactgaggaggaaaaggaggagatgaaggaggtgcaggagatgaagcgcatccatcaacggttcgccaagaagcggcaaatggagcgcgaggctcgcgcccttcgacgtcaacaggagtacgagaagttcttcggcaccgcccccaaatcggaatgttccgataacaacaacttttga

SEQ ID NO: 4 - protein, 750 aa, Drosophila melanogaster
  ref <308>: DATABASE ACCESSION NUMBER: Genbank AAF49752
  ref <309>: DATABASE ENTRY DATE: 2002-09-17
MGNTESNVTSGVKKQAGVSTQALYKFVNLKGGGLLVDMMKRACQTKQFAEIDHAIKTKVEPFLYNKGAGRYFPISKLVLLRNRDRPRTRQLPEIRALENPDDDFNIHDYCPEVSEAEYISNPTAYRFVCWDLNMRGAVGETILHLCLLNASSLHADLAKRLLKFYPKLILDIYMSDEYYGESVLHIAIVNEDPAMVKYLLDANADVQERCCGAFMSAEDTKFSRTDSPDHEYVALCPMTNYDGYVYWGEYPLSFAACLSQEECFRLVLARGADPDFQDTNGNTVLHMLVIYEKIEMFDVGYEVGTNIHIKNIQNLTPLTLAAKLGRVEMFFHVMSIEREIYWQLGSITCAAYPLLMIDTINEETGNINKDSVLNFVVFGDKLEHLELLDGVVIDLLKTKWDTFCKSRFYKQFYMFALYFLISLFSFILRPGPDAKDEDEDGANSTTAKKTFWLNFTEYYDPSEVEVLPAWWESYAQCPLMNLESDLAKLRIMAELLNFVGAILYLLVALREARFLGLKMFIENLAMMIYRMVMGDLLRFVSIYLVFVMGFSQAFYIIFLTFDNPSSPEDQDAESNPMPSPMESIVAMFLMSLTNFGDYYGAMVSTQHEYEAKILFFLFMVIVSVLLVNMLIAMMGNTYQKIAEIRNEWQRQWARIVLVVERSVPPAERLKNFMQYSQSMSDGRRALVLRLNMTEEEKEEMKEVQEMKRIHQRFAKKRQMEREARALRRQQEYEKFFGTAPKSECSDNNNF

SEQ ID NO: 5 - DNA, 2178 bp, Homo sapiens
  CDS (1)...(2175)
  ref <308>: DATABASE ACCESSION NUMBER: Genbank AAG41951
  ref <309>: DATABASE ENTRY DATE: 2000-12-21
atgggtttgtcactgcccaaggagaaagggctaattctctgcctatggagcaagttctgcagatggttccagagacgggagtcctgggcccagagccgagatgagcaggacctgctgcagcagaagaggatctgggagtctcctctccttctagctgccaaagataatgatgtccaggccctgaacaagttgctcaagtatgaggattgcaaggtgcaccatagaggagccatgggggaaacagcgctacacatagcagccctctatgacaacctggaggccgccatggtgctgatggaggctgccccggagctggtctttgagcccatgacatctgagctctatgagggtcagactgcactgcacatcgctgttgtgaaccagaacatgaacctggtgcgagccctgcttgcccgcagggccagtgtctctgccagagccacaggcactgccttccgccgtagtccctgcaacctcatctactttggggagcaccctttgtcctttgctgcctgtgtgaacagtgaggagatcgtgcggctgctcattgagcatggagctgacatccgggcccaggactccctgggaaacacagtgttacacatcctcatcctccagcccaacaaaacctttgcctgccagatgtacaacctgttgctgtcctacgacagacatggggaccacctgcagcccctggacctcgtgcccaatcaccagggtctcacccctttcaagctggctggagtggagggtaacactgtgatgtttcagcacctgatgcagaagcggaagcacacccagtggacgtatggaccactgacctcgactctctatgacctcacagagatcgactcctcaggggatgagcagtccctgctggaacttatcatcaccaccaagaagcgggaggctcgccagatcctggaccagacgccggtgaaggagctggtgagcctcaagtggaagcggtacgggcggccgtacttctgcatgctgggtgccatatatctgctgtacatcatctgcttcaccatgtgctgcatctaccgccccctcaagcccaggaccaataaccgcacgagcccccgggacaacaccctcttacagcagaagctacttcaggaagcctacatgacccctaaggacgatatccggctggtcggggagctggtgactgtcattggggctatcatcatcctgctggtagaggttccagacatcttcagaatgggggtcactcgcttctttggacagaccatccttgggggcccattccatgtcctcatcatcacctatgccttcatggtgctggtgaccatggtgatgcggctcatcagtgccagcggggaggtggtacccatgtcctttgcactcgtgctgggctggtgcaatgtcatgtacttcgcccgaggattccagatgctaggccccttcaccatcatgattcagaagatgatttttggcgacctgatgcgattctgctggctgatggctgtggtcatcctgggctttgcttcagccttctatatcatcttccagacagaggaccccgaggagctaggccacttctacgactaccccatggccctgttcagcaccttcgagctgttccttaccatcatcgatggcccagccaactacaacgtggacctgcccttcatgtacagcatcacctatgctgcctttgccatcatcgccacactgctcatgctcaacctcctcattgccatgatgggcgacactcactggcgagtggcccatgagcgggatgagctgtggagggcccagattgtggccaccacggtgatgctggagcggaagctgcctcgctgcctgtggcctcgctccgggatctgcggacgggagtatggcctgggagaccgctggttcctgcgggtggaagacaggcaagatctcaaccggcagcggatccaacgctacgcacaggccttccacacccggggctctgaggatttggacaaagactcagtggaaaaactagagctgggctgtcccttcagcccccacctgtcccttcctatgccctcagtgtctcgaagtacctcccgcagcagtgccaactgggaaaggcttcggcaagggaccctgaggagagacctgcgtgggataatcaacaggggtctggaggacggggagagctgggaatatcagatctga

SEQ ID NO: 6 - protein, 725 aa, Homo sapiens
  ref <308>: DATABASE ACCESSION NUMBER: Genbank AAG41951
  ref <309>: DATABASE ENTRY DATE: 2000-12-21
MGLSLPKEKGLILCLWSKFCRWFQRRESWAQSRDEQDLLQQKRIWESPLLLAAKDNDVQALNKLLKYEDCKVHHRGAMGETALHIAALYDNLEAAMVLMEAAPELVFEPMTSELYEGQTALHIAVVNQNMNLVRALLARRASVSARATGTAFRRSPCNLIYFGEHPLSFAACVNSEEIVRLLIEHGADIRAQDSLGNTVLHILILQPNKTFACQMYNLLLSYDRHGDHLQPLDLVPNHQGLTPFKLAGVEGNTVMFQHLMQKRKHTQWTYGPLTSTLYDLTEIDSSGDEQSLLELIITTKKREARQILDQTPVKELVSLKWKRYGRPYFCMLGAIYLLYIICFTMCCIYRPLKPRTNNRTSPRDNTLLQQKLLQEAYMTPKDDIRLVGELVTVIGAIIILLVEVPDIFRMGVTRFFGQTILGGPFHVLIITYAFMVLVTMVMRLISASGEVVPMSFALVLGWCNVMYFARGFQMLGPFTIMIQKMIFGDLMRFCWLMAVVILGFASAFYIIFQTEDPEELGHFYDYPMALFSTFELFLTIIDGPANYNVDLPFMYSITYAAFAIIATLLMLNLLIAMMGDTHWRVAHERDELWRAQIVATTVMLERKLPRCLWPRSGICGREYGLGDRWFLRVEDRQDLNRQRIQRYAQAFHTRGSEDLDKDSVEKLELGCPFSPHLSLPMPSVSRSTSRSSANWERLRQGTLRRDLRGIINRGLEDGESWEYQI

SEQ ID NO: 7 - DNA, 2178 bp, Homo sapiens
  CDS (1)...(2175)
  ref <308>: DATABASE ACCESSION NUMBER: Genbank CAC20417
  ref <309>: DATABASE ENTRY DATE: 2002-04-09
atgggtttgtcactgcccaaggagaaagggctaattctctgcctatggagcaagttctgcagatggttccagagacgggagtcctgggcccagagccgagatgagcagaacctgctgcagcagaagaggatctgggagtctcctctccttctagctgccaaagataatgatgtccaggccctgaacaagttgctcaagtatgaggattgcaaggtgcaccagagaggagccatgggggaaacagcgctacacatagcagccctctatgacaacctggaggccgccatggtgctgatggaggctgccccggagctggtctttgagcccatgacatctgagctctatgagggtcagactgcactgcacatcgctgttgtgaaccagaacatgaacctggtgcgagccctgcttgcccgcagggccagtgtctctgccagagccacaggcactgccttccgccgtagtccctgcaacctcatctactttggggagcaccctttgtcctttgctgcctgtgtgaacagtgaggagatcgtgcggctgctcattgagcatggagctgacatccgggcccaggactccctgggaaacacagtgttacacatcctcatcctccagcccaacaaaacctttgcctgccagatgtacaacctgttgctgtcctacgacagacatggggaccacctgcagcccctggacctcgtgcccaatcaccagggtctcacccctttcaagctggctggagtggagggtaacactgtgatgtttcagcacctgatgcagaagcggaagcacacccagtggacgtatggaccactgacctcgactctctatgacctcacagagatcgactcctcaggggatgagcagtccctgctggaacttatcatcaccaccaagaagcgggaggctcgccagatcctggaccagacgccggtgaaggagctggtgagcctcaagtggaagcggtacgggcggccgtacttctgcatgctgggtgccatatatctgctgtacatcatctgcttcaccatgtgctgcatctaccgccccctcaagcccaggaccaataaccgcacgagcccccgggacaacaccctcttacagcagaagctacttcaggaagcctacatgacccctaaggacgatatccggctggtcggggagctggtgactgtcattggggctatcatcatcctgctggtagaggttccagacatcttcagaatgggggtcactcgcttctttggacagaccatccttgggggcccattccatgtcctcatcatcacctatgccttcatggtgctggtgaccatggtgatgcggctcatcagtgccagcggggaggtggtacccatgtcctttgcactcgtgctgggctggtgcaacgtcatgtacttcgcccgaggattccagatgctaggccccttcaccatcatgattcagaagatgatttttggcgacctgatgcgattctgctggctgatggctgtggtcatcctgggctttgcttcagccttctatatcatcttccagacagaggaccccgaggagctaggccacttctacgactaccccatggccctgttcagcaccttcgagctgttccttaccatcatcgatggcccagccaactacaacgtggacctgcccttcatgtacagcatcacctatgctgcctttgccatcatcgccacactgctcatgctcaacctcctcattgccatgatgggcgacactcactggcgagtggcccatgagcgggatgagctgtggagggcccagattgtggccaccacggtgatgctggagcggaagctgcctcgctgcctgtggcctcgctccgggatctgcggacgggagtatggcctgggagaccgctggttcctgcgggtggaagacaggcaagatctcaaccggcagcggatccaacgctacgcacaggccttccacacccggggctctgaggatttggacaaagactcagtggaaaaactagagctgggctgtcccttcagcccccacctgtcccttcctatgccctcagtgtctcgaagtacctcccgcagcagtgccaattgggaaaggcttcggcaagggaccctgaggagagacctgcgtgggataatcaacaggggtctggaggacggggagagctgggaatatcagatctga

SEQ ID NO: 8 - protein, 725 aa, Homo sapiens
  ref <308>: DATABASE ACCESSION NUMBER: Genbank CAC20417
  ref <309>: DATABASE ENTRY DATE: 2002-04-09
MGLSLPKEKGLILCLWSKFCRWFQRRESWAQSRDEQNLLQQKRIWESPLLLAAKDNDVQALNKLLKYEDCKVHQRGAMGETALHIAALYDNLEAAMVLMEAAPELVFEPMTSELYEGQTALHIAVVNQNMNLVRALLARRASVSARATGTAFRRSPCNLIYFGEHPLSFAACVNSEEIVRLLIEHGADIRAQDSLGNTVLHILILQPNKTFACQMYNLLLSYDRHGDHLQPLDLVPNHQGLTPFKLAGVEGNTVMFQHLMQKRKHTQWTYGPLTSTLYDLTEIDSSGDEQSLLELIITTKKREARQILDQTPVKELVSLKWKRYGRPYFCMLGAIYLLYIICFTMCCIYRPLKPRTNNRTSPRDNTLLQQKLLQEAYMTPKDDIRLVGELVTVIGAIIILLVEVPDIFRMGVTRFFGQTILGGPFHVLIITYAFMVLVTMVMRLISASGEVVPMSFALVLGWCNVMYFARGFQMLGPFTIMIQKMIFGDLMRFCWLMAVVILGFASAFYIIFQTEDPEELGHFYDYPMALFSTFELFLTIIDGPANYNVDLPFMYSITYAAFAIIATLLMLNLLIAMMGDTHWRVAHERDELWRAQIVATTVMLERKLPRCLWPRSGICGREYGLGDRWFLRVEDRQDLNRQRIQRYAQAFHTRGSEDLDKDSVEKLELGCPFSPHLSLPMPSVSRSTSRSSANWERLRQGTLRRDLRGIINRGLEDGESWEYQI

SEQ ID NO: 9 - DNA, 2178 bp, Homo sapiens
  CDS (1)...(2175)
  ref <308>: DATABASE ACCESSION NUMBER: Genbank CAC20416
  ref <309>: DATABASE ENTRY DATE: 2002-04-10
atgggtttgtcactgcccaaggagaaagggctaattctctgcctatggagcaagttctgcagatggttccagagacgggagtcctgggcccagagccgagatgagcagaacctgctgcagcagaagaggatctgggagtctcctctccttctagctgccaaagataatgatgtccaggccctgaacaagttgctcaagtatgaggattgcaaggtgcaccagagaggagccatgggggaaacagcgctacacatagcagccctctatgacaacctggaggccgccatggtgctgatggaggctgccccggagctggtctttgagcccatgacatctgagctctatgagggtcagactgcactgcacatcgctgttgtgaaccagaacatgaacctggtgcgagccctgcttgcccgcagggccagtgtctctgccagagccacaggcactgccttccgccgtagtccccgcaacctcatctactttggggagcaccctttgtcctttgctgcctgtgtgaacagtgaggagatcgtgcggctgctcattgagcatggagctgacatccgggcccaggactccctgggaaacacagtgttacacatcctcatcctccagcccaacaaaacctttgcctgccagatgtacaacctgttgctgtcctacgacagacatggggaccacctgcagcccctggacctcgtgcccaatcaccagggtctcacccctttcaagctggctggagtggagggtaacactgtgatgtttcagcacctgatgcagaagcggaagcacacccagtggacgtatggaccactgacctcgactctctatgacctcacagagatcgactcctcaggggatgagcagtccctgctggaacttatcatcaccaccaagaagcgggaggctcgccagatcctggaccagacgccggtgaaggagctggtgagcctcaagtggaagcggtacgggcggccgtacttctgcatgctgggtgccatatatctgctgtacatcatctgcttcaccatgtgctgcatctaccgccccctcaagcccaggaccaataaccgcacaagcccccgggacaacaccctcttacagcagaagctacttcaggaagcctacgtgacccctaaggacgatatccggctggtcggggagctggtgactgtcattggggctatcatcatcctgctggtagaggttccagacatcttcagaatgggggtcactcgcttctttggacagaccatccttgggggcccattccatgtcctcatcatcacctatgccttcatggtgctggtgaccatggtgatgcggctcatcagtgccagcggggaggtggtacccatgtcctttgcactcgtgctgggctggtgcaacgtcatgtacttcgcccgaggattccagatgctaggccccttcaccatcatgattcagaagatgatttttggcgacctgatgcgattctgctggctgatggctgtggtcatcctgggctttgcttcagccttctatatcatcttccagacagaggaccccgaggagctaggccacttctacgactaccccatggccctgttcagcaccttcgagctgttccttaccatcatcgatggcccagccaactacaacgtggacctgcccttcatgtacagcatcacctatgctgcctttgccatcatcgccacactgctcatgctcaacctcctcattgccatgatgggcgacactcactggcgagtggcccatgagcgggatgagctgtggagggcccagattgtggccaccacggtgatgctggagcggaagctgcctcgctgcctgtggcctcgctccgggatctgcggacgggagtatggcctgggggaccgctggttcctgcgggtggaagacaggcaagatctcaaccggcagcggatccaacgctacgcacaggccttccacacccggggctctgaggatttggacaaagactcagtggaaaaactagagctgggctgtcccttcagcccccacctgtcccttcctacgccctcagtgtctcgaagtacctcccgcagcagtgccaattgggaaaggcttcggcaagggaccctgaggagagacctgcgtgggataatcaacaggggtctggaggacggggagagctgggaatatcagatctga

SEQ ID NO: 10 - protein, 725 aa, Homo sapiens
  ref <308>: DATABASE ACCESSION NUMBER: Genbank CAC20416
  ref <309>: DATABASE ENTRY DATE: 2002-04-10
MGLSLPKEKGLILCLWSKFCRWFQRRESWAQSRDEQNLLQQKRIWESPLLLAAKDNDVQALNKLLKYEDCKVHQRGAMGETALHIAALYDNLEAAMVLMEAAPELVFEPMTSELYEGQTALHIAVVNQNMNLVRALLARRASVSARATGTAFRRSPRNLIYFGEHPLSFAACVNSEEIVRLLIEHGADIRAQDSLGNTVLHILILQPNKTFACQMYNLLLSYDRHGDHLQPLDLVPNHQGLTPFKLAGVEGNTVMFQHLMQKRKHTQWTYGPLTSTLYDLTEIDSSGDEQSLLELIITTKKREARQILDQTPVKELVSLKWKRYGRPYFCMLGAIYLLYIICFTMCCIYRPLKPRTNNRTSPRDNTLLQQKLLQEAYVTPKDDIRLVGELVTVIGAIIILLVEVPDIFRMGVTRFFGQTILGGPFHVLIITYAFMVLVTMVMRLISASGEVVPMSFALVLGWCNVMYFARGFQMLGPFTIMIQKMIFGDLMRFCWLMAVVILGFASAFYIIFQTEDPEELGHFYDYPMALFSTFELFLTIIDGPANYNVDLPFMYSITYAAFAIIATLLMLNLLIAMMGDTHWRVAHERDELWRAQIVATTVMLERKLPRCLWPRSGICGREYGLGDRWFLRVEDRQDLNRQRIQRYAQAFHTRGSEDLDKDSVEKLELGCPFSPHLSLPTPSVSRSTSRSSANWERLRQGTLRRDLRGIINRGLEDGESWEYQI

SEQ ID NO: 11 - DNA, 2184 bp, Rattus norvegicus
  CDS (1)...(2181)
  ref <308>: DATABASE ACCESSION NUMBER: Genbank AAD47636
  ref <309>: DATABASE ENTRY DATE: 1999-09-09
atggggtggtcactgcccaaggagaaggggttaatactctgcctatggaacaagttctgcagatggttccacagacgagagtcctgggctcagagccgagatgagcagaacctgctgcagcagaagaggatctgggagtcgcctcttcttctagctgccaaagaaaacaatgtccaggctctgatcaaactgctcaagtttgaaggatgtgaggtgcaccagaaaggagccatgggggaaactgcacttcacatagctgccctctatgataacctggaggctgccatggtgctaatggaggctgccccagaactggtttttgagcccatgacttcagagctatatgaaggtcagactgcactgcacattgcagtaataaaccagaatgtgaacttggtccgtgctctgcttgcccgaggggccagtgtctccgccagagctacgggctctgtcttccactacaggcctcacaatctcatttactatggagaacatcctttgtcctttgctgcctgtgtgggtagtgaggagattgttagactgctcatcgagcatggggctgacattcgggcccaggactccttgggaaatacagtactacacatactcatcttgcagcccaacaaaacctttgcctgccagatgtacaacctgctactgtcctatgatgggggagaccacctgaagtcccttgaacttgtgcccaataaccaaggactcacccctttcaagttggctggggtggaaggcaacattgtgatgttccaacacctgatgcagaagcggaaacacatccagtggacttatgggccattgacttccacactttatgacctcactgagattgactcctcaggggatgatcaatctctactggaacttattgttaccaccaagaagcgggaggctcgccagatcctggaccagacacctgtgaaggaactggtgagcctcaagtggaagaggtatgggcggccctacttctgtgtgctgggtgccatctacgtgctctacatcatctgctttaccatgtgctgtgtctaccgcccactcaagcccaggatcactaaccgcaccaaccccagggacaataccctcctgcagcagaagctccttcaggaggcctatgtgacccccaaggatgatctccggctggtgggggagctggtgagcatcgttggggctgtgatcatcctgctggtggagattccagacatcttcaggttgggggtcactcgattttttgggcagaccattcttggggggccattccatgtcatcattgtcacttatgccttcatggtgctggtgaccatggtgatgcggctcaccaactcagatggagaggtggtgcccatgtcgtttgctctggtgttgggctggtgcaatgtcatgtactttgccagaggattccaaatgctgggtcccttcaccatcatgatccagaagatgatttttggtgacttgatgcgattctgctggctgatggctgtggtaatcttgggatttgcttcagccttctatatcatcttccagacagaggaccccgatgagctgggccatttctatgactaccccatggcactgttcagcacctttgaactcttcctcaccatcatcgatggccctgccaactatgacgtggatctgcccttcatgtacagcatcacctacgctgcctttgccatcatcgccacactgctcatgctcaacctcctaattgccatgatgggtgacactcactggagagttgcccatgagcgggatgagctctggagagcacaggttgtggctactaccgtgatgctagaacggaagctgcctcgctgcctgtggcctcgatctgggatatgtgggcgagagtatggtcttggggaccgctggttcttgagggtggaagatagacaagatctcaacagacaacgcatccgccgctatgcacaggccttccagcaacaagatgacctctactctgaggacttggaaaaagactcaggagaaaaactggagatggcacgaccctttggtgcctatctgtcctttcctacaccctcagtgtctcgaagtacctcccgaagcagcaccaattgggacaggcttcgacaaggggccctaaggaaggaccttcaagggataatcaaccggggcctggaagatggggagggctgggagtaccagatctaa

SEQ ID NO: 12 - protein, 727 aa, Rattus norvegicus
  ref <308>: DATABASE ACCESSION NUMBER: Genbank AAD47636
  ref <309>: DATABASE ENTRY DATE: 1999-09-09
MGWSLPKEKGLILCLWNKFCRWFHRRESWAQSRDEQNLLQQKRIWESPLLLAAKENNVQALIKLLKFEGCEVHQKGAMGETALHIAALYDNLEAAMVLMEAAPELVFEPMTSELYEGQTALHIAVINQNVNLVRALLARGASVSARATGSVFHYRPHNLIYYGEHPLSFAACVGSEEIVRLLIEHGADIRAQDSLGNTVLHILILQPNKTFACQMYNLLLSYDGGDHLKSLELVPNNQGLTPFKLAGVEGNIVMFQHLMQKRKHIQWTYGPLTSTLYDLTEIDSSGDDQSLLELIVTTKKREARQILDQTPVKELVSLKWKRYGRPYFCVLGAIYVLYIICFTMCCVYRPLKPRITNRTNPRDNTLLQQKLLQEAYVTPKDDLRLVGELVSIVGAVIILLVEIPDIFRLGVTRFFGQTILGGPFHVIIVTYAFMVLVTMVMRLTNSDGEVVPMSFALVLGWCNVMYFARGFQMLGPFTIMIQKMIFGDLMRFCWLMAVVILGFASAFYIIFQTEDPDELGHFYDYPMALFSTFELFLTIIDGPANYDVDLPFMYSITYAAFAIIATLLMLNLLIAMMGDTHWRVAHERDELWRAQVVATTVMLERKLPRCLWPRSGICGREYGLGDRWFLRVEDRQDLNRQRIRRYAQAFQQQDDLYSEDLEKDSGEKLEMARPFGAYLSFPTPSVSRSTSRSSTNWDRLRQGALRKDLQGIINRGLEDGEGWEYQI

SEQ ID NO: 13 - DNA, 2190 bp, Mus musculus
  CDS (1)...(2187)
  ref <308>: DATABASE ACCESSION NUMBER: Genbank BAA99538
  ref <309>: DATABASE ENTRY DATE: 2000-07-12
atggggtggtccctgcccaaggagaaggggttaatactctgcctatggaacaagttctgcagatggttccacagacaagagtcctgggctcagagccgagacgagcagaacctgctgcagcagaagaggatctgggaatcacctcttcttctagctgccaaagaaaacgatgtccaggctctgagcaagctgctcaagtttgaaggatgtgaggtgcaccagagaggagccatgggggaaactgcacttcacatagcagccctctatgataacctggaggctgcaatggtgctaatggaggctgccccagaactagtctttgagcccatgacttcggagctatatgaaggtcagactgcactacacatggcagtaataaaccagaatgtaaacttggtccgtgctctgcttgcccgaagggccagtgtctctgccagagctacaggctctgtcttcactacagggccttacaaacctcattactatggagagcaccctttgtcctttgctgcctgtgtgggtagtgaaggagatggtagactgctcattgagcatggagctgacatccgtgcccagggactctctgggaaatacgagtactacaacatactcatcctgcagcccaacaaaacctttgcctgccagatgtacaacttgctactgtcctatgatgggggagaccacctgaagtccctggaacttgtgccaaataaccagggactcacccccttcaagttggctggggtggaaggcaacattgtgatgttccaacacctgatgcagaagcggaaacacatccagtggacatatgggccattgacctccacactgtatgacctcactgagattgactcctcaggagatgatcaatccctactggaacttattgttactaccaagaaacgggaggctcgccagatcctggaccagacacctgtaaaggaactggtgagcctcaagtggaagaggtatgggcggccctacttctgcgtgctgggtgccatctatgtgctgtacatcatctgctttaccatgtgctgtgtctaccgcccgctcaagcccaggatcactaaccgcaccaacccccgggacaacactctgatgcaacagaagctccttcaggaggcctatgtgacccctaaggatgacctccggttggtgggggaactcgtgagcatcgttggggctgtgatcatcctgctggtggagattccagacatcttcaggttgggggtcactcgattctttggacagaccattctcggggggccattccatgtcatcattatcacttatgccttcatggtgctggtgaccatggtgatgcgactcaccaatgtagatggagaagtggtgcccatgtcctttgctcggtgttggctggtccaatgtcatgactttgccagaggattccagatgctgggtcccttcacccttcatgattccagaagattgatttttggtgaccttaatgcgattttctgctggctcatggctgtggtaattctgggatttgcttcagccttctatatcattttccagacagaggatcccgatgagctgggtcatttctatgactaccccatggcactgttcagcacctttgaactcttcctcaccatcatcgatggccctgcgaactatgacgtggatctgcccttcatgtacagcgttacctacgctgcctttgccatcatcgccacactgctcatgcttaacctcctcattgccatgatgggtgacactcactggagagttgcccatgagcgagatgagctctggagagcacaggttgtggccaccactgtgatgttagagcggaagctacctcgttgcctgtggcctcgctctgggatatgtgggcgagagtatggtcttggcgaccgctggttcttgagggtggaagacaggcaagatctcaacagacaacgcatccgccgctatgcacaggccttccagcaacaagatggcctctactctgaggacttggaaaaagattcaggagaaaaactggagacagcacgtccctttggtgcctatctgtcctttcctacaccctcagtatctcgaagtacctcccgaagcagcaccaattgggaaaggcttcgacaaggggccctgaggaaggacctgcgggggataatcaaccggggcctagaagatggggagggctgggagtaccagatctga

SEQ ID NO: 14 - protein, 729 aa, Mus musculus
  ref <308>: DATABASE ACCESSION NUMBER: Genbank BAA99538
  ref <309>: DATABASE ENTRY DATE: 2000-07-12
MGWSLPKEKGLILCLWNKFCRWFHRQESWAQSRDEQNLLQQKRIWESPLLLAAKENDVQALSKLLKFEGCEVHQRGAMGETALHIAALYDNLEAAMVLMEAAPELVFEPMTSELYEGQTALHMAVINQNVNLVRALLARRASVSARATGSVFTTGPYKPHYYGEHPLSFAACVGSEGDGRLLIEHGADIRAQGLSGKYEYYNILILQPNKTFACQMYNLLLSYDGGDHLKSLELVPNNQGLTPFKLAGVEGNIVMFQHLMQKRKHIQWTYGPLTSTLYDLTEIDSSGDDQSLLELIVTTKKREARQILDQTPVKELVSLKWKRYGRPYFCVLGAIYVLYIICFTMCCVYRPLKPRITNRTNPRDNTLMQQKLLQEAYVTPKDDLRLVGELVSIVGAVIILLVEIPDIFRLGVTRFFGQTILGGPFHVIIITYAFMVLVTMVMRLTNVDGEVVPMSFARCWLVQCHDFARGFQMLGPFTLHDSRRLIFGDLNAIFCWLMAVVILGFASAFYIIFQTEDPDELGHFYDYPMALFSTFELFLTIIDGPANYDVDLPFMYSVTYAAFAIIATLLMLNLLIAMMGDTHWRVAHERDELWRAQVVATTVMLERKLPRCLWPRSGICGREYGLGDRWFLRVEDRQDLNRQRIRRYAQAFQQQDGLYSEDLEKDSGEKLETARPFGAYLSFPTPSVSRSTSRSSTNWERLRQGALRKDLRGIINRGLEDGEGWEYQI

SEQ ID NO: 15 - DNA, 2178 bp, Homo sapiens; identical to SEQ ID NO: 7
  CDS (1)...(2175)
  ref <308>: DATABASE ACCESSION NUMBER: Genbank AAL40230
  ref <309>: DATABASE ENTRY DATE: 2001-12-11

SEQ ID NO: 16 - protein, 725 aa, Homo sapiens; identical to SEQ ID NO: 8
  ref <308>: DATABASE ACCESSION NUMBER: Genbank AAL40230
  ref <309>: DATABASE ENTRY DATE: 2001-12-11

SEQ ID NO: 17 - DNA, 2184 bp, Mus musculus
  CDS (1)...(2181)
  ref <308>: DATABASE ACCESSION NUMBER: Genbank AAH16101
  ref <309>: DATABASE ENTRY DATE: 2002-09-20
atggggtggtccctgcccaaggagaaggggttaatactctgcctatggaacaagttctgcagatggttccacagacaagagtcctgggctcagagccgagacgagcagaacctgctgcagcagaagaggatctgggaatcacctcttcttctagctgccaaagaaaacgatgtccaggctctgagcaagctgctcaagtttgaaggatgtgaggtgcaccagagaggagccatgggggaaactgcacttcacatagcagccctctatgataacctggaggctgcaatggtgctaatggaggctgccccagaactagtctttgagcccatgacttcggagctatatgaaggtcagactgcactacacattgcagtaataaaccagaatgtaaacttggtccgtgctctgcttgcccgaggggccagtgtctctgccagagctacaggctctgtcttccactacaggcctcacaacctcatttactatggagagcaccctttgtcctttgctgcctgtgtgggtagtgaggagattgttagactgctcattgagcatggagctgacatccgtgcccaggactctctgggaaatacagtactacacatactcatcctgcagcccaacaaaacctttgcctgccagatgtacaacttgctactgtcctatgatgggggagaccacctgaagtccctggaacttgtgccaaataaccagggactcacccccttcaagttggctggggtggaaggcaacattgtgatgttccaacacctgatgcagaagcggaaacacatccagtggacatatgggccattgacctccacactgtatgacctcactgagattgactcctcaggagatgatcaatccctactggaacttattgttactaccaagaaacgggaggctcgccagatcctggaccagacacctgtaaaggaactggtgagcctcaagtggaagaggtatgggcggccctacttctgcgtgctgggtgccatctatgtgctgtacatcatctgctttaccatgtgctgtgtctaccgcccgctcaagcccaggatcactaaccgcaccaacccccgggacaacactctgatgcaacagaagctccttcaggaggcctatgtgacccctaaggatgacctccggttggtgggggaactcgtgagcatcgttggggctgtgatcatcctgctggtggagattccagacatcttcaggttgggggtcactcgattctttggacagaccattctcggggggccattccatgtcatcattatcacttatgccttcatggtgctggtgaccatggtgatgcgactcaccaatgtagatggagaagtggtgcccatgtcctttgctctggtgttgggctggtgcaatgtcatgtactttgccagaggattccagatgctgggtcccttcaccatcatgattcagaagatgatttttggtgacttgatgcgattctgctggctgatggctgtggtaattctgggatttgcttcagccttctatatcattttccagacagaggatcccgatgagctgggtcatttctatgactaccccatggcactgttcagcacctttgaactcttcctcaccatcatcgatggccctgccaactatgacgtggatctgcccttcatgtacagcgttacctacgctgcctttgccatcatcgccacactgctcatgcttaacctcctcattgccatgatgggtgacactcactggagagttgcccatgagcgagatgagctctggagagcacaggttgtggccaccactgtgatgttagagcggaagctacctcgttgcctgtggcctcgctctgggatatgtgggcgagagtatggtcttggcgaccgctggttcttgagggtggaagacaggcaagatctcaacagacaacgcatccgccgctatgcacaggccttccagcaacaagatggcctctactctgaggacttggaaaaagattcaggagaaaaactggagacagcacgtccctttggtgcctatctgtcctttcctacaccctcagtatctcgaagtacctcccgaagcagcaccaattgggaaaggcttcgacaaggggccctgaggaaggacctgcgggggataatcaaccggggcctagaagatggggagggctgggagtaccagatctga

SEQ ID NO: 18 - protein, 727 aa, Mus musculus
  ref <308>: DATABASE ACCESSION NUMBER: Genbank AAH16101
  ref <309>: DATABASE ENTRY DATE: 2002-09-20
MGWSLPKEKGLILCLWNKFCRWFHRQESWAQSRDEQNLLQQKRIWESPLLLAAKENDVQALSKLLKFEGCEVHQRGAMGETALHIAALYDNLEAAMVLMEAAPELVFEPMTSELYEGQTALHIAVINQNVNLVRALLARGASVSARATGSVFHYRPHNLIYYGEHPLSFAACVGSEEIVRLLIEHGADIRAQDSLGNTVLHILILQPNKTFACQMYNLLLSYDGGDHLKSLELVPNNQGLTPFKLAGVEGNIVMFQHLMQKRKHIQWTYGPLTSTLYDLTEIDSSGDDQSLLELIVTTKKREARQILDQTPVKELVSLKWKRYGRPYFCVLGAIYVLYIICFTMCCVYRPLKPRITNRTNPRDNTLMQQKLLQEAYVTPKDDLRLVGELVSIVGAVIILLVEIPDIFRLGVTRFFGQTILGGPFHVIIITYAFMVLVTMVMRLTNVDGEVVPMSFALVLGWCNVMYFARGFQMLGPFTIMIQKMIFGDLMRFCWLMAVVILGFASAFYIIFQTEDPDELGHFYDYPMALFSTFELFLTIIDGPANYDVDLPFMYSVTYAAFAIIATLLMLNLLIAMMGDTHWRVAHERDELWRAQVVATTVMLERKLPRCLWPRSGICGREYGLGDRWFLRVEDRQDLNRQRIRRYAQAFQQQDGLYSEDLEKDSGEKLETARPFGAYLSFPTPSVSRSTSRSSTNWERLRQGALRKDLRGIINRGLEDGEGWEYQI

SEQ ID NO: 19 - DNA, 2193 bp, Oryctolagus cuniculus
  CDS (1)...(2190)
  ref <308>: DATABASE ACCESSION NUMBER: Genbank CAB40138
  ref <309>: DATABASE ENTRY DATE: 1999-04-14
atgggggcctgtccacccaaggcaaaggggccctgggcccaactgcagaaacttctgatctcctggccggttggagaacaagactgggaacagtaccgggaccgggtcaatatgctacaacaggaaaggattcgagattctccattgctgcaggcggccaaggaaaatgatctgcgtctccttaagatacttctgctgaaccagtcctgtgattttcaacaaagaggagctgtgggggagacggcgctgcacgtcgcagccctctatgacaacctggaagccgccacgttgctgatggaggccgccccagagctggccaaggagcccgccctgtgtgagccatttgtaggtcagactgcactgcacatcgctgtcatgaaccagaacctgaacctggtgcgcgcactgcttgctcgtggggccagcgtctctgccagagctacaggtgctgccttccgccgcagtccccacaacctcatctactatggagagcaccctttgtcctttgctgcctgtgtgggcagcgaggagatcgtgaggctgctcattgagcacggagccgacatccgggcccaggactccctgggaaacacggtgctgcacatcctcatcctgcagcccaacaagacctttgcctgccagatgtacaacctgctgctgtcctacgatgagcacagtgaccacctgcagtccctggaactcgtgcccaaccaccagggcctcactcccttcaagctggcaggggtggagggcaacactgtgatgttccagcacctgatgcagaagcggaagcacgtccagtggacctgtgggccactgacctccacactctatgacctcacggagatcgactcctggggagaggagctgtcttttctagagctcgtggtctcttccaagaagcgagaggctcggcagatcctggagcagacgccagtgaaggaactggtgagcttcaagtggaagaaatacgggcggccttacttctgcgtgctggcttccctgtacattctgtacatgatctgcttcaccacctgctgcatctaccgccccctcaagttgcgtgacgacaaccgcactgaccctagagatatcaccatcctccaacagaagctgctgcaggaggcctacgtgactcaccaggataacatccgactggtaggagagctggtgaccgtgacaggggctgtgatcattctgctcctagagatcccagacattttcagagttggtgcctctcgctattttggacagaccatcctcgggggacccttccatgtcatcattatcacctacgcttccctggtgctcctgaccatggtcatgcggctcaccaacatgaatggggaggtggtccccttatcctttgccctggtgctgggctggtgcagtgtcatgtactttgctcgaggattccagatgctaggcccattcaccatcatgatccagaagatgatttttggagacctaatgcgtttctgctggctaatggctgtggttatcctgggatttgcctcagcgttccatatcactttccagacagaggaccctaacaacctgggggaattctctgactaccccacggcactgttcagcacctttgagctgttcctcaccatcatcgacggccctgccaactacagtgtggacctgcccttcatgtactgcatcacctacgccgccttcgccatcatcgccacactgctcatgctcaacctgttcattgccatgatgggcgacactcactggcgggtggcccaggagcgggatgagctgtggagggcccaggttgtggccaccaccgtgatgctggagcggaagatgcctcgcttcctgtggcctcgctctgggatctgtgggtatgagtatggactaggagaccgctggttcctgcgggttgagaaccatcatgaccagaatcctctgcgagtgcttcgctatgtggaagcattcaagtgctcagacaaggaggatggacaagaacaactttctgagaagcggccctctacggttgagagcgggatgctatccagagcctctgtggcattccaaaccccctccctatctcgaaccacatcccaaagcagcaacagtcaccggggctgggagatccttcgtcgaaacaccttgggacacttgaatcttggactggaccttggtgaaggagatggagaggaagtctaccatttctga

SEQ ID NO: 20 - protein, 730 aa, Oryctolagus cuniculus
  ref <308>: DATABASE ACCESSION NUMBER: Genbank CAB40138
  ref <309>: DATABASE ENTRY DATE: 1999-04-14
MGACPPKAKGPWAQLQKLLISWPVGEQDWEQYRDRVNMLQQERIRDSPLLQAAKENDLRLLKILLLNQSCDFQQRGAVGETALHVAALYDNLEAATLLMEAAPELAKEPALCEPFVGQTALHIAVMNQNLNLVRALLARGASVSARATGAAFRRSPHNLIYYGEHPLSFAACVGSEEIVRLLIEHGADIRAQDSLGNTVLHILILQPNKTFACQMYNLLLSYDEHSDHLQSLELVPNHQGLTPFKLAGVEGNTVMFQHLMQKRKHVQWTCGPLTSTLYDLTEIDSWGEELSFLELVVSSKKREARQILEQTPVKELVSFKWKKYGRPYFCVLASLYILYMICFTTCCIYRPLKLRDDNRTDPRDITILQQKLLQEAYVTHQDNIRLVGELVTVTGAVIILLLEIPDIFRVGASRYFGQTILGGPFHVIIITYASLVLLTMVMRLTNMNGEVVPLSFALVLGWCSVMYFARGFQMLGPFTIMIQKMIFGDLMRFCWLMAVVILGFASAFHITFQTEDPNNLGEFSDYPTALFSTFELFLTIIDGPANYSVDLPFMYCITYAAFAIIATLLMLNLFIAMMGDTHWRVAQERDELWRAQVVATTVMLERKMPRFLWPRSGICGYEYGLGDRWFLRVENHHDQNPLRVLRYVEAFKCSDKEDGQEQLSEKRPSTVESGMLSRASVAFQTPSLSRTTSQSSNSHRGWEILRRNTLGHLNLGLDLGEGDGEEVYHF

SEQ ID NO: 21 - DNA, 2172 bp, Rattus norvegicus
  CDS (1)...(2169)
  ref <308>: DATABASE ACCESSION NUMBER: Genbank BAA99541
  ref <309>: DATABASE ENTRY DATE: 2000-07-18
atgggggtgaaaaaaccttggatccaacttcagaaacgtctcaactggtgggtcagagaacaagactggaaccagcatgtggatcagcttcatatgctacagcagaaaagtatttgggagtcaccactgcttagagcagccaaggaaaatgatatgtgcacacttaagagacttcaacatgaccagaactgtgacttccgacaaagaggagctctgggggagacagcactgcatgtagcagccctctatgacaacctggatgctgctataatgctgatggagactgctccatacttggtcacggagtctacactgtgtgagccatttgtaggtcagactgcactgcacatcgcaattatgaaccagaatgtgaacctggtccgtgccctgctagcccgaggagccagtgcctccgccagggctacaggttctgccttccatcgaagttcccacaacctcatctactatggagaacatcctttgtcctttgctgcctgtgtgggtagtgaggagattgttagactgctcattgagcatggagctgacattcgggcccaggactccttgggaaatacagtactacacatacttgtcctacagcccaacaaaacctttgcctgccagatgtacaacctgctactctcccatgatgggggagaccacctgaagtccctggaacttgtgcccaacaaccaaggactcacccccttcaagctggctggggtggaaggcaacactgtgatgtttcaacacctgatgcaaaaacggaagcacatccagtggtcattaggacccctaacatcttccatttatgatctcacagaaattgactcctggggtgaggacttgtcctttctggagcttgtgctttcctccaagaagatagaggctcgtcagattctagaacaaacccctgtgaaggagctggtgagcctgaagtggaagaaatatggacaaccctatttctgcctcctgggtatgctgtacatctcctacatgatctgcttcaccacatgctgtgtttaccgccccctcaagttccgtgatgccaaccgtacacatgttagagataacaccgtcctggaacagaaaccactacaggaagcgtatgtgacttaccaggataaggtccggctggtgggagaactcgtgacagtcattggggctgtggttattctactcatagagatcccagacatcttcagagttggtgcctctcgctactttggacacacagttcttgggggtccattccatgtcattatcatcacatatgcctcccttgtgctactgattatggtgatgaggcttaccagtatgaatggggaggtggtccccatatccatggccttggtactgggctggtgtagtgtcatgtacttctcccgaggattccagatgctgggccccttcacaatcatgattcagaagatgatttttggagacctactgcgcttctgccggctaatggctatggtcatcctcggatttgcctctgccttctatatcatcttccagaccgaggatccagagagtctgggagaattctccgactaccctacagcaatgttcagcacctttgagctcttccttaccatcattgacggtccggccaattacagtgtggatctacccttcatgtaccacctaacctattttgcttttgccatcatcgccacactactcatgctcaatttgttcattgccatgatgggtgacactcactggcgagtggcccaggagagggacgaactctggagagcacaggttgtagccaccacagtgatgctggagaggaaaatgccccgtttcctgtggcctcgctctggtatctgtggttgcgaatatggcctgggagaccgctggttcttacgggttgaacaccaccaggagcagaatccgtatcgagtacttcgctatgtggaagctttcaaatcttcagacaaggaggaagtacaagaacaactatctgagaagcagccttccgggactgagactgggactttagctagaggctctgtggttctgcaaacgcctcctttgtccaggactacatccctaagcagcaatagccaccgtggatgggaaattctccgtcgaaacaccctgggacatttgaatcttggacaagaccttggtgagggagacggagaggagatctaccatttctga

SEQ ID NO: 22 - protein, 723 aa, Rattus norvegicus
  ref <308>: DATABASE ACCESSION NUMBER: Genbank BAA99541
  ref <309>: DATABASE ENTRY DATE: 2000-07-18
MGVKKPWIQLQKRLNWWVREQDWNQHVDQLHMLQQKSIWESPLLRAAKENDMCTLKRLQHDQNCDFRQRGALGETALHVAALYDNLDAAIMLMETAPYLVTESTLCEPFVGQTALHIAIMNQNVNLVRALLARGASASARATGSAFHRSSHNLIYYGEHPLSFAACVGSEEIVRLLIEHGADIRAQDSLGNTVLHILVLQPNKTFACQMYNLLLSHDGGDHLKSLELVPNNQGLTPFKLAGVEGNTVMFQHLMQKRKHIQWSLGPLTSSIYDLTEIDSWGEDLSFLELVLSSKKIEARQILEQTPVKELVSLKWKKYGQPYFCLLGMLYISYMICFTTCCVYRPLKFRDANRTHVRDNTVLEQKPLQEAYVTYQDKVRLVGELVTVIGAVVILLIEIPDIFRVGASRYFGHTVLGGPFHVIIITYASLVLLIMVMRLTSMNGEVVPISMALVLGWCSVMYFSRGFQMLGPFTIMIQKMIFGDLLRFCRLMAMVILGFASAFYIIFQTEDPESLGEFSDYPTAMFSTFELFLTIIDGPANYSVDLPFMYHLTYFAFAIIATLLMLNLFIAMMGDTHWRVAQERDELWRAQVVATTVMLERKMPRFLWPRSGICGCEYGLGDRWFLRVEHHQEQNPYRVLRYVEAFKSSDKEEVQEQLSEKQPSGTETGTLARGSVVLQTPPLSRTTSLSSNSHRGWEILRRNTLGHLNLGQDLGEGDGEEIYHF

SEQ ID NO: 23 - DNA, 2190 bp, Homo sapiens
  CDS (1)...(2187)
  ref <308>: DATABASE ACCESSION NUMBER: Genbank CAB96365
  ref <309>: DATABASE ENTRY DATE: 2002-10-29
atggggggttttctacctaaggcagaagggcccgggagccaactccagaaacttctgccctcctttctggtcagagaacaagactgggaccagcacctggacaagcttcatatgctgcagcagaagaggattctagagtctccactgcttcgagcatccaaggaaaatgacctgtctgttcttaggcaacttctactggactgcacctgtgacgttcgacaaagaggagccctgggggagacggcgctgcacatagcagccctctatgacaacttggaggcggccttggtgctgatggaggctgccccagagctggtctttgagcccaccacatgtgaggcttttgcaggtcagactgcactgcacatcgctgttgtgaaccagaatgtgaacctggtgcgtgccctgctcacccgcagggccagtgtctctgccagagccacaggcactgccttccgccgtagtccccgcaacctcatctactttggggagcaccctttgtcctttgctgcctgtgtgaacagcgaggagatcgtgcggctgctcattgagcatggagctgacatcagggcccaggactccctgggaaacacagtattacacatcctcatcctccagcccaacaaaacctttgcctgccagatgtacaacctgctgctgtcctacgatggacatggggaccacctgcagcccctggaccttgtgcccaatcaccagggtctcacccccttcaagctggctggagtggagggtaacactgtgatgttccagcacctgatgcagaagcggaggcacatccagtggacgtatggacccctgacctccattctctacgacctcacagagatcgactcctggggagaggagctgtccttcctggagcttgtggtctcctctgataaacgagaggctcgccaaattctggaacagaccccagtgaaggagctggtgagcttcaagtggaacaagtatggccggccgtacttctgcatcctggctgccttgtacctgctctacatgatctgctttaccacgtgctgcgtctaccgcccccttaagtttcgtggtggcaaccgcactcattctcgagacatcaccatcctccagcaaaaactactacaggaggcctatgagacacgtgaagatatcatcaggctggtgggggagctggtgagcatcgttggggctgtgatcatcctgctcctagagattccagacatcttcagggttggtgcctctcgctattttggaaagacgattcttggggggccattccatgtcatcatcatcacctatgcctccctggtgctggtgaccatggtgatgcggctcaccaacaccaatggggaggtggtgcccatgtcctttgccctggtgctgggctggtgcagtgtcatgtatttcactcgaggattccagatgctgggtcccttcaccatcatgatccagaagatgatttttggagacctaatgcgtttctgctggctgatggctgtggtcatcttgggatttgcctccgcgttctatatcattttccagacagaggacccaaccagtctggggcaattctatgactaccccatggcactgttcaccacctttgagctttttctcactgttattgatgcacctgccaactacgacgtggacttgcccttcatgttcagcattgtcaacttcgccttcgccatcattgccacactgctcatgctcaacttgttcatcgccatgatgggcgacacccactggagggtggcccaggagagggatgagctctggagggcccaggtcgtggccaccacagtgatgctggagcggaagctgcctcgctgcctgtggcctcgctccgggatctgtgggtgcgaattcgggctgggggaccgctggttcctgcgggttgagaaccacaatgatcagaatcctctgcgagtgcttcgctatgtggaagtgttcaagaactcagacaaggaggatgaccaggagcatccatctgagaaacagccctctggggctgagagtgggactctagccagagcctctttggctcttccaacttcctccctgtcccggaccgcgtcccagagcagcagtcaccgaggctgggagatccttcgtcaaaacaccctggggcacttgaatcttggactgaaccttagtgagggggatggagaggaggtctaccatttttga

SEQ ID NO: 24 - protein, 729 aa, Homo sapiens
  ref <308>: DATABASE ACCESSION NUMBER: Genbank CAB96365
  ref <309>: DATABASE ENTRY DATE: 2002-10-29
MGGFLPKAEGPGSQLQKLLPSFLVREQDWDQHLDKLHMLQQKRILESPLLRASKENDLSVLRQLLLDCTCDVRQRGALGETALHIAALYDNLEAALVLMEAAPELVFEPTTCEAFAGQTALHIAVVNQNVNLVRALLTRRASVSARATGTAFRRSPRNLIYFGEHPLSFAACVNSEEIVRLLIEHGADIRAQDSLGNTVLHILILQPNKTFACQMYNLLLSYDGHGDHLQPLDLVPNHQGLTPFKLAGVEGNTVMFQHLMQKRRHIQWTYGPLTSILYDLTEIDSWGEELSFLELVVSSDKREARQILEQTPVKELVSFKWNKYGRPYFCILAALYLLYMICFTTCCVYRPLKFRGGNRTHSRDITILQQKLLQEAYETREDIIRLVGELVSIVGAVIILLLEIPDIFRVGASRYFGKTILGGPFHVIIITYASLVLVTMVMRLTNTNGEVVPMSFALVLGWCSVMYFTRGFQMLGPFTIMIQKMIFGDLMRFCWLMAVVILGFASAFYIIFQTEDPTSLGQFYDYPMALFTTFELFLTVIDAPANYDVDLPFMFSIVNFAFAIIATLLMLNLFIAMMGDTHWRVAQERDELWRAQVVATTVMLERKLPRCLWPRSGICGCEFGLGDRWFLRVENHNDQNPLRVLRYVEVFKNSDKEDDQEHPSEKQPSGAESGTLARASLALPTSSLSRTASQSSSHRGWEILRQNTLGHLNLGLNLSEGDGEEVYHF

SEQ ID NO: 25 - DNA, 2172 bp, Rattus norvegicus
  CDS (1)...(2169)
  ref <308>: DATABASE ACCESSION NUMBER: Genbank AAF86309
  ref <309>: DATABASE ENTRY DATE: 2000-09-11
atgggggtgaaaaaaccttggatccaacttcagaaacgtctcaactggtgggtcagagaacaagactggaaccagcatgtggatcagcttcatatgctacagcagaaaagtatttgggagtcaccactgcttagagcagccaaggaaaatgatatgtgcacacttaagagacttcaacatgaccagaactgtgacttccgacaaagaggagctctgggggagacagcactgcatgtagcagccctctatgacaacctggatgctgctataatgctgatggagactgctccatacttggtcacggagtctacactgtgtgagccatttgtaggtcagactgcactgcacatcgcaattatgaaccagaatgtgaacctggtccgtgccctgctagcccgaggagccagtgcctccgccagggctacaggttctgccttccatcgaagttcccacaacctcatctactatggagaacatcctttgtcctttgctgcctgtgtgggtagtgaggagattgttagactgctcattgagcatggagctgacattcgggcccaggactccttgggaaatacagtactacacatacttgtcctacagcccaacaaaacctttgcctgccagatgtacaacctgctactctcccatgatgggggagaccacctgaagtccctggaacttgtgcccaacaaccaaggactcacccccttcaagctggctggggtggaaggcaacactgtgatgtttcaacacctgatgcaaaaacggaagcacatccagtggtcattaggacccctaacatcttccatttatgatctcacagaaattgactcctggggtgaggacttgtcctttctggagcttgtggtttcctccaagaagaaagaggctcgtcagattctagaacaaacccctgtgaaggagctggtgagcctgaagtggaagaaatatggacaaccctatttctgcctcctgggtatgctgtacatcttctacatgatctgcttcaccacatgctgtgtttaccgccccctcaagttccgtgatgccaaccgtacacatgttagagataacaccgtcctggaacagaaaccactacaggaagcgtatgtgacttaccaggataaggtccggctggtgggagaactcgtgacagtcattggggctgtggttattctactcatagagatcccagacatcttcagagttggtgcctctcgctactttggacacacagttcttgggggtccattccatgtcattatcatcacatatgcctcccttgtgctactgattatggtgatgaggcttaccagtatgaatggggaggtggtccccatatccatggccttggtactgggctggtgtagtgtcatgtacttctcccgaggattccagatgctgggccccttcacaatcatgattcagaagatgatttttggagacctactgcgcttctgctggctaatggctatggtcatcctcggatttgcctctgccttctatatcatcttccagacagaggatccagagagtctgggagaattctccgactaccctacagcaatgttcagcacctttgagctcttccttaccatcattgacggtccggccaattacagtgtggatctacccttcatgtaccacctaacctattttgcttttgccatcatcgccacactactcatgctcaatttgttcattgccatgatgggtgacactcactggcgagtggcccaggagagggacgaactctggagagcacaggttgtagccaccacagtgatgctggagaggaaaatgccccgtttcctgtggcctcgctctggtatctgtggttgcgaatatggcctgggagaccgctggttcttacgggttgaacaccaccaggagcagaatccgtatcgagtacttcgctatgtggaagctttcaaatcttcagacaaggaggaagtacaagaacaactatctgagaagcagccttccgggactgagactgggactttagctagaggctctgtggttctgcaaacgcctcctttgtccaggactacatccctaagcagcaatagccaccgtggatgggaaattctccgtcgaaacaccctgggacatttgaatcttggacaagaccttggtgagggagacggagaggagatctaccatttctga

SEQ ID NO: 26 - protein, 723 aa, Rattus norvegicus
  ref <308>: DATABASE ACCESSION NUMBER: Genbank AAF86309
  ref <309>: DATABASE ENTRY DATE: 2000-09-11
MGVKKPWIQLQKRLNWWVREQDWNQHVDQLHMLQQKSIWESPLLRAAKENDMCTLKRLQHDQNCDFRQRGALGETALHVAALYDNLDAAIMLMETAPYLVTESTLCEPFVGQTALHIAIMNQNVNLVRALLARGASASARATGSAFHRSSHNLIYYGEHPLSFAACVGSEEIVRLLIEHGADIRAQDSLGNTVLHILVLQPNKTFACQMYNLLLSHDGGDHLKSLELVPNNQGLTPFKLAGVEGNTVMFQHLMQKRKHIQWSLGPLTSSIYDLTEIDSWGEDLSFLELVVSSKKKEARQILEQTPVKELVSLKWKKYGQPYFCLLGMLYIFYMICFTTCCVYRPLKFRDANRTHVRDNTVLEQKPLQEAYVTYQDKVRLVGELVTVIGAVVILLIEIPDIFRVGASRYFGHTVLGGPFHVIIITYASLVLLIMVMRLTSMNGEVVPISMALVLGWCSVMYFSRGFQMLGPFTIMIQKMIFGDLLRFCWLMAMVILGFASAFYIIFQTEDPESLGEFSDYPTAMFSTFELFLTIIDGPANYSVDLPFMYHLTYFAFAIIATLLMLNLFIAMMGDTHWRVAQERDELWRAQVVATTVMLERKMPRFLWPRSGICGCEYGLGDRWFLRVEHHQEQNPYRVLRYVEAFKSSDKEEVQEQLSEKQPSGTETGTLARGSVVLQTPPLSRTTSLSSNSHRGWEILRRNTLGHLNLGQDLGEGDGEEIYHF

SEQ ID NO: 27 - DNA, 2190 bp, Homo sapiens
  CDS (1)...(2817)
  misc_feature 1520, 1521, 1522, 1523, 1524, 1525, 1526, 1527, 1528, 1529,1530, 1531, 1532, 1533, 1534, 1535, 1536, 1537, 1538, 1539,1540, 1541, 1542, 1543, 1544, 1545, 1546, 1547, 1548, 1549,1550, 1551, 1552, 1553, 1554, 1555, 1556, 1557, 1558: n = A,T,C or G
  misc_feature 1559, 1560, 1561, 1562, 1563, 1564, 1565, 1566, 1567, 1568,1569, 1570, 1571, 1572, 1573, 1574, 1575, 1576, 1577, 1578,1579, 1580, 1581, 1582, 1583, 1584, 1585, 1586, 1587, 1588,1589, 1590, 1591, 1592, 1593, 1594, 1595, 1596, 1597: n = A,T,C or G
  misc_feature 1598, 1599, 1600, 1601, 1602, 1603, 1604, 1605, 1606, 1607,1608, 1609, 1610, 1611, 1612, 1613, 1614, 1615, 1616, 1617,1618, 1619, 1620, 1621, 1622, 1623, 1624, 1625, 1626, 1627,1628, 1629, 1630, 1631, 1632, 1633, 1634, 1635, 1636: n = A,T,C or G
  misc_feature 1637, 1638, 1639, 1640, 1641, 1642, 1643, 1644, 1645, 1646,1647, 1648, 1649, 1650, 1651, 1652, 1653, 1654, 1655, 1656,1657, 1658, 1659, 1660, 1661, 1662, 1663, 1664, 1665, 1666,1667, 1668, 1669, 1670, 1671, 1672, 1673, 1674, 1675: n = A,T,C or G
  misc_feature 1676, 1677, 1678, 1679, 1680, 1681, 1682, 1683, 1684, 1685,1686, 1687, 1688, 1689, 1690, 1691, 1692, 1693, 1694, 1695,1696, 1697, 1698, 1699, 1700, 1701, 1702, 1703, 1704, 1705,1706, 1707, 1708, 1709, 1710, 1711, 1712, 1713, 1714: n = A,T,C or G
  VARIANT 507, 508, 509, 510, 511, 512, 513, 514, 515, 516, 517, 518,519, 520, 521, 522, 523, 524, 525, 526, 527, 528, 529, 530,531, 532, 533, 534, 535, 536, 537, 538, 539, 540, 541, 542,543, 544, 545, 546, 547, 548, 549, 550, 551, 552, 553: Xaa = Any Amino Acid
  VARIANT 554, 555, 556, 557, 558, 559, 560, 561, 562, 563, 564, 565,566, 567, 568, 569, 570, 571, 572, 573, 574, 575, 576, 577,578, 579, 580, 581, 582, 583, 584, 585, 586, 587, 588, 589,590, 591, 592, 593, 594, 595, 596: Xaa = Any Amino Acid
  ref <308>: DATABASE ACCESSION NUMBER: Genbank XP_005003
  ref <309>: DATABASE ENTRY DATE: 2001-10-16
atggggggttttctacctaaggcagaagggcccgggagccaactccagaaacttctgccctcctttctggtcagagaacaagactgggaccagcacctggacaagcttcatatgctgcagcagaagaggattctagagtctccactgcttcgagcatccaaggaaaatgacctgtctgttcttaggcaacttctactggactgcacctgtgacgttcgacaaagaggagccctgggggagacggcgctgcacatagcagccctctatgacaacttggaggcggccttggtgctgatggaggctgccccagagctggtctttgagcccaccacatgtgaggcttttgcaggtcagactgcactgcacatcgctgttgtgaaccagaatgtgaacctggtgcgtgccctgctcacccgcagggccagtgtctctgccagagccacaggcactgccttccgccgtagtccccgcaacctcatctactttggggagcaccctttgtcctttgctgcctgtgtgaacagcgaggagatcgtgcggctgctcattgagcatggagctgacatcagggcccaggactccctgggaaacacagtattacacatcctcatcctccagcccaacaaaacctttgcctgccagatgtacaacctgctgctgtcctacgatggacatggggaccacctgcagcccctggaccttgtgcccaatcaccagggtctcacccccttcaagctggctggagtggagggtaacactgtgatgttccagcacctgatgcagaagcggaggcacatccagtggacgtatggacccctgacctccattctctacgacctcacagagatcgactcctggggagaggagctgtccttcctggagcttgtggtctcctctgataaacgagaggctcgccaaattctggaacagaccccagtgaaggagctggtgagcttcaagtggaacaagtatggccggccgtacttctgcatcctggctgccttgtacctgctctacatgatctgctttaccacgtgctgcgtctaccgcccccttaagtttcgtggtggcaaccgcactcattctcgagacatcaccatcctccagcaaaaactactacaggaggcctatgagacacgtgaagatatcatcaggctggtgggggagctggtgagcatcgttggggctgtgatcatcctgctcctagagattccagacatcttcagggttggtgcctctcgctattttggaaagacgattcttggggggccattccatgtcatcatcatcacctatgcctccctggtgctggtgaccatggtgatgcggctcaccaacaccaatggggaggtggtgcccatgtcctttgccctggtgctgggctggtgcagtgtcatgtatttcactcgaggattccagatgctgggtcccttcaccatcatgatccagaagatgatttttggagacctaatgcgtttctgctggctgatggctgtggtcatcttgggatttgcctccgnnnnnnnnnnnnnnnnnnnnnnnnnnnnnnnnnnnnnnnnnnnnnnnnnnnnnnnnnnnnnnnnnnnnnnnnnnnnnnnnnnnnnnnnnnnnnnnnnnnnnnnnnnnnnnnnnnnnnnnnnnnnnnnnnnnnnnnnnnnnnnnnnnnnnnnnnnnnnnnnnnnnnnnnnnnnnnnnnnnnnnnnnnnnnnnnnnnnnnnnnnnnnnnnnnnnnnnnnnnnnnnnnnnnnnnnnnnnnnnnnnnnnnnnnnnnnnnnnnnnnnnnnnnnngtcgtggccaccacagtgatgctggagcggaagctgcctcgctgcctgtggcctcgctccgggatctgtgggtgcgaattcgggctgggggaccgctggttcctgcgggttgagaaccacaatgatcagaatcctctgcgagtgcttcgctatgtggaagtgttcaagaactcagacaaggaggatgaccaggagcatccatctgagaaacagccctctggggctgagagtgggactctagccagagcctctttggctcttccaacttcctccctgtcccggaccgcgtcccagagcagcagtcaccgaggctgggagatccttcgtcaaaacaccctggggcacttgaatcttggactgaaccttagtgagggggatggagaggaggtctaccatttttga

SEQ ID NO: 28 - protein, 729 aa, Homo sapiens
  VARIANT 507, 508, 509, 510, 511, 512, 513, 514, 515, 516, 517, 518,519, 520, 521, 522, 523, 524, 525, 526, 527, 528, 529, 530,531, 532, 533, 534, 535, 536, 537, 538, 539, 540, 541, 542,543, 544, 545, 546, 547, 548, 549, 550, 551, 552, 553: Xaa = Any Amino Acid
  VARIANT 554, 555, 556, 557, 558, 559, 560, 561, 562, 563, 564, 565,566, 567, 568, 569, 570, 571, 572, 573, 574, 575, 576, 577,578, 579, 580, 581, 582, 583, 584, 585, 586, 587, 588, 589,590, 591, 592, 593, 594, 595, 596: Xaa = Any Amino Acid
  ref <308>: DATABASE ACCESSION NUMBER: Genbank XP_005003
  ref <309>: DATABASE ENTRY DATE: 2001-10-16
MGGFLPKAEGPGSQLQKLLPSFLVREQDWDQHLDKLHMLQQKRILESPLLRASKENDLSVLRQLLLDCTCDVRQRGALGETALHIAALYDNLEAALVLMEAAPELVFEPTTCEAFAGQTALHIAVVNQNVNLVRALLTRRASVSARATGTAFRRSPRNLIYFGEHPLSFAACVNSEEIVRLLIEHGADIRAQDSLGNTVLHILILQPNKTFACQMYNLLLSYDGHGDHLQPLDLVPNHQGLTPFKLAGVEGNTVMFQHLMQKRRHIQWTYGPLTSILYDLTEIDSWGEELSFLELVVSSDKREARQILEQTPVKELVSFKWNKYGRPYFCILAALYLLYMICFTTCCVYRPLKFRGGNRTHSRDITILQQKLLQEAYETREDIIRLVGELVSIVGAVIILLLEIPDIFRVGASRYFGKTILGGPFHVIIITYASLVLVTMVMRLTNTNGEVVPMSFALVLGWCSVMYFTRGFQMLGPFTIMIQKMIFGDLMRFCWLMAVVILGFASXXXXXXXXXXXXXXXXXXXXXXXXXXXXXXXXXXXXXXXXXXXXXXXXXXXXXXXXXXXXXXXXXXXXXXXXXXXXXXXXXXXXXXXXXXVVATTVMLERKLPRCLWPRSGICGCEFGLGDRWFLRVENHNDQNPLRVLRYVEVFKNSDKEDDQEHPSEKQPSGAESGTLARASLALPTSSLSRTASQSSSHRGWEILRQNTLGHLNLGLNLSEGDGEEVYHF

SEQ ID NO: 29 - DNA, 2190 bp, Homo sapiens; identical to SEQ ID NO: 23
  CDS (1)...(2187)
  ref <308>: DATABASE ACCESSION NUMBER: Genbank AAL04015
  ref <309>: DATABASE ENTRY DATE: 2001-09-16

SEQ ID NO: 30 - protein, 729 aa, Homo sapiens; identical to SEQ ID NO: 24
  ref <308>: DATABASE ACCESSION NUMBER: Genbank AAL04015
  ref <309>: DATABASE ENTRY DATE: 2001-09-16

SEQ ID NO: 31 - DNA, 2814 bp, Caenorhabditis elegans
  CDS (1)...(2811)
  ref <308>: DATABASE ACCESSION NUMBER: Genbank AAB87064
  ref <309>: DATABASE ENTRY DATE: 1997-11-25
atgggcggtggaagttcgcgaaacaaaaccgaaccacgtggcgagggagtcaagctcgcgtttgaccccgatgagaaatggtcgaacttgtatagagaaagggaaaagaatcacttgtacaagtgggtcgctgtcaggaaaggcggagaattgatcaacatttacgagcgagatggtgaggaaggcgtcctaaaatttgcagaagagaaactcctcacaattctctatgatgagggccagaatccaaaacttgtcacctacagtgattatatcaaatggaagaagggagtgaacgtgcaactcgggctcagcgaagagtccgtggacatgcagcagagccggttcaaggagcattacgcactttggaaactgaacaagagaggtgtggaaggcgaaaatttgatccatcttttgttgaacagagaacagcaagtttgctacgaaattgccaggattttgctcaagcggttccctgggatggctaatgacatttatttgggggatgagcaatttggccaatcagccctccacctagccattgtacacgatgactacgagaccgtaagcctgcttctgaatagcaaggccgacgtgaatgcccgcgcctgtggaaacttcttcctacccgaagactttaagcttactaataagattactgactatcaaggttatgcctattacggggagtaccccctagcatttgccgcttgttttggaaacaaggatatctacgatttgttgattcaattcggtgccaacccgaatctccaggactcttttggaaatactattctccacatgtgtgttattaactatagtagctccatgtactcctacgcggtccgtcattgggcaaagcctgcggatcctcatgttgtcaaccacgcaggcttcacgccgctgaccttggccaccaagttgggtagaaagcagattttcgaggaaatgctggagattatgaaggtggagttctggaggttctcggatatgacgtgctccgcatatccactgaatactctcgacactattcagccggacgggtctacaaactacgactcggcactaatgacagtaatcaacgggtcgacaccagaacatttggacatgatcggaagtgaggtgatccaacgtttgctggctgataagtggaaggcttttgcgcagagaaaactgatcgaacgtctggtacttctcattgttcaactcatcactctatccatcgtagtatacatccgtccgacagagcttccccggctctacatggaagatccccagtgggatgattacatccgtaccgcctgtgaattgttaacaattttgaactgcatatttttcgtcggctaccagcaacttggagaaattcggacacaaggaatgcggggttatctaaggaacttgaaaaccgcaccagccaaggcagtattctgcatagccaacctcttcctactcctctgtattccgttccgtctgatgaaaaaacacgaaatcgaggaggctctcttcgtgttcgccctgcccggttcctggatctttctgctcttcttcgcccgttccgctaagctcactggacccttcgtacaaatgatctatagtatgattgccggagacatgattcggtttgcgattatttcggcgatcttcctggtttccttctcgcaagtattctactttgttggaaaagacatggatgcgaagcaaaaactagaagacacaaatcctcatgcctgtcgaatttcgggatacacaatttacacctataacacttttccagagacttttattactttgttccgagcttcgatgggtggttatgactacgaagaattctcgtgcgccaactaccaggctctcaccaagacgctattcgtgctttacatgttcgttatgccaattatgatgatcaacattctcatcgccatgatgggtaacacgtacacgacggttatcgcacaagccgagaaagcctggagacagcagtacgcgcagattgtgatggtcttggagaggtcggtgggcaaggaacggttggcggcgagtcagttggagtatagtattcggttggatcaggaaggctcatctggaatggaagttcgcggtctaatggttatcaaacaaactaaaaagacccgtgcacgtcagagaaagcaagcaatatacaactggaagactatcggccgaaaagtgattcataccattgacaaagtgggtaccgaacaagcagtactccttcttcatggccacgatcgcctcgacagagtctacgaagatcatgttcagcctgagaaagttcccagtcgttcgagaactccaacacgtatcggaactacactgaattcttcaaaacgacttaagactactacaatggttgttggcgccgctgtgaccaacactcatgaggtacgaacggatgaagctgtgaatagcatgctcctgtcagctccgccgagtctatcaggtgaaggtgcaacgatggactggcagccgtctattacaccggttgaggaacggagtgaatcgaaatcacaggaggatcggtcagaagcttccacaccaaatctgggaattcataggacgaccccaaaagctgattcgccgattagagttgtggaatatagccgcacaatccgagtccgcgcggccgacactatcccgtccatcgaacttccgaacatcccgacgaagcagacgtcttcaacgcccccacatcgtgcagtatcaccacgtctccgtgcggatatgttcaggagacaccagcaaccggcttcgtttgatcagagtcctccactcccgccgacaaatgacaaaagcgaatga

SEQ ID NO: 32 - protein, 937 aa, Caenorhabditis elegans
  ref <308>: DATABASE ACCESSION NUMBER: Genbank AAB87064
  ref <309>: DATABASE ENTRY DATE: 1997-11-25
MGGGSSRNKTEPRGEGVKLAFDPDEKWSNLYREREKNHLYKWVAVRKGGELINIYERDGEEGVLKFAEEKLLTILYDEGQNPKLVTYSDYIKWKKGVNVQLGLSEESVDMQQSRFKEHYALWKLNKRGVEGENLIHLLLNREQQVCYEIARILLKRFPGMANDIYLGDEQFGQSALHLAIVHDDYETVSLLLNSKADVNARACGNFFLPEDFKLTNKITDYQGYAYYGEYPLAFAACFGNKDIYDLLIQFGANPNLQDSFGNTILHMCVINYSSSMYSYAVRHWAKPADPHVVNHAGFTPLTLATKLGRKQIFEEMLEIMKVEFWRFSDMTCSAYPLNTLDTIQPDGSTNYDSALMTVINGSTPEHLDMIGSEVIQRLLADKWKAFAQRKLIERLVLLIVQLITLSIVVYIRPTELPRLYMEDPQWDDYIRTACELLTILNCIFFVGYQQLGEIRTQGMRGYLRNLKTAPAKAVFCIANLFLLLCIPFRLMKKHEIEEALFVFALPGSWIFLLFFARSAKLTGPFVQMIYSMIAGDMIRFAIISAIFLVSFSQVFYFVGKDMDAKQKLEDTNPHACRISGYTIYTYNTFPETFITLFRASMGGYDYEEFSCANYQALTKTLFVLYMFVMPIMMINILIAMMGNTYTTVIAQAEKAWRQQYAQIVMVLERSVGKERLAASQLEYSIRLDQEGSSGMEVRGLMVIKQTKKTRARQRKQAIYNWKTIGRKVIHTIDKVGTEQAVLLLHGHDRLDRVYEDHVQPEKVPSRSRTPTRIGTTLNSSKRLKTTTMVVGAAVTNTHEVRTDEAVNSMLLSAPPSLSGEGATMDWQPSITPVEERSESKSQEDRSEASTPNLGIHRTTPKADSPIRVVEYSRTIRVRAADTIPSIELPNIPTKQTSSTPPHRAVSPRLRADMFRRHQQPASFDQSPPLPPTNDKSE

SEQ ID NO: 33 - DNA, 2286 bp, Rattus norvegicus
  CDS (1)...(2283)
  ref <308>: DATABASE ACCESSION NUMBER: Genbank BAA88637
  ref <309>: DATABASE ENTRY DATE: 1999-12-25
atgacttcagcctccagccccccagctttcaggctggagacttccgatggagatgaagagggcaatgctgaggtgaacaaggggaagcaggaaccgccccccatggagtcaccattccagagggaggaccggaattcctcccctcagatcaaagtgaacctcaacttcataaagagacctcctaaaaacacttctgctcccagccagcaggagccagatcggtttgaccgtgaccgactcttcagtgtggtctcccggggtgtccccgaggaactgactggactgctagaatacctgcgctggaacagcaagtacctcactgactctgcatacacagaaggctccactggaaagacgtgcctgatgaaggctgtgctgaaccttcaggatggggtcaatgcctgcatcatgccgctgctgcagattgacaaggattccggcaatcccaagctcctcgtcaatgcccagtgcaccgatgagttctaccaaggccacagtgcgctgcacatcgccatagagaagaggagcctgcagtgcgtgaagctgctggtagagaatggagcggatgttcacctccgagcctgtggccgcttcttccaaaagcaccaaggaacttgtttctattttggagagctacctctttctctggctgcgtgcaccaagcagtgggatgtggtgacctacctcctggagaacccacaccagccggccagcctggaggccaccgactccctgggcaacacagtcctgcatgctctggtaatgattgcagataactcgcctgagaacagtgccctggtgatccacatgtacgacgggcttctacaaatgggggcgcgcctctgccccactgtgcagcttgaggaaatctccaaccaccaaggcctcacacccctgaaactagccgccaaggaaggcaaaatcgagattttcaggcacattctgcagcgggaattctcaggaccgtaccagcccctttcccgaaagtttactgagtggtgttacggtcctgtgcgggtatcgctgtacgacctgtcctctgtggacagctgggaaaagaactcggtgctggagatcatcgcttttcattgcaagagcccgaaccggcaccgcatggtggttttagaaccactgaacaagcttctgcaggagaaatgggatcggctcgtctcaagattcttcttcaacttcgcctgctacttggtctacatgttcatcttcaccgtcgttgcctaccaccagccttccctggatcagccagccatcccctcatcaaaagcgacttttggggaatccatgctgctgctgggccacattctgatcctgcttgggggtatttacctcttactgggccagctgtggtacttttggcggcggcgcctgtttatctggatctcattcatggacagctactttgaaatcctctttctccttcaggctctgctcacagtgctgtcccaggtgctgcgcttcatggagactgaatggtacctacccctgctagtgttatccctagtgctgggctggctgaacctgctttactacacacggggctttcagcacacaggcatctacagtgtcatgatccagaaggtcatccttcgagacctgctccgtttcctgctggtctacctggtcttccttttcggctttgctgtagccctagtaagcttgagcagagaggcccgaagtcccaaagcccctgaagataacaactccacagtgacggaacagcccacggtgggccaggaggaggagccagctccatatcggagcattctggatgcctccctagagctgttcaagttcaccattggtatgggggagctggctttccaggaacagctgcgttttcgtggggtggtcctgctgttgctgttggcctacgtccttctcacctacgtcctgctgctcaacatgctcattgctctcatgagcgaaactgtcaaccacgttgctgacaacagctggagcatctggaagttgcagaaagccatctctgtcttggagatggagaatggttactggtggtgccggaggaagaaacatcgtgaagggaggctgctgaaagtcggcaccaggggggatggtacccctgatgagcgctggtgcttcagggtggaggaagtaaattgggctgcttgggagaagactcttcccaccttatctgaggatccatcagggccaggcatcactggtaataaaaagaacccaacctctaaaccggggaagaacagtgcctcagaggaagaccatctgccccttcaggtcctccagtccccctga

SEQ ID NO: 34 - protein, 761 aa, Rattus norvegicus
  ref <308>: DATABASE ACCESSION NUMBER: Genbank BAA88637
  ref <309>: DATABASE ENTRY DATE: 1999-12-25
MTSASSPPAFRLETSDGDEEGNAEVNKGKQEPPPMESPFQREDRNSSPQIKVNLNFIKRPPKNTSAPSQQEPDRFDRDRLFSVVSRGVPEELTGLLEYLRWNSKYLTDSAYTEGSTGKTCLMKAVLNLQDGVNACIMPLLQIDKDSGNPKLLVNAQCTDEFYQGHSALHIAIEKRSLQCVKLLVENGADVHLRACGRFFQKHQGTCFYFGELPLSLAACTKQWDVVTYLLENPHQPASLEATDSLGNTVLHALVMIADNSPENSALVIHMYDGLLQMGARLCPTVQLEEISNHQGLTPLKLAAKEGKIEIFRHILQREFSGPYQPLSRKFTEWCYGPVRVSLYDLSSVDSWEKNSVLEIIAFHCKSPNRHRMVVLEPLNKLLQEKWDRLVSRFFFNFACYLVYMFIFTVVAYHQPSLDQPAIPSSKATFGESMLLLGHILILLGGIYLLLGQLWYFWRRRLFIWISFMDSYFEILFLLQALLTVLSQVLRFMETEWYLPLLVLSLVLGWLNLLYYTRGFQHTGIYSVMIQKVILRDLLRFLLVYLVFLFGFAVALVSLSREARSPKAPEDNNSTVTEQPTVGQEEEPAPYRSILDASLELFKFTIGMGELAFQEQLRFRGVVLLLLLAYVLLTYVLLLNMLIALMSETVNHVADNSWSIWKLQKAISVLEMENGYWWCRRKKHREGRLLKVGTRGDGTPDERWCFRVEEVNWAAWEKTLPTLSEDPSGPGITGNKKNPTSKPGKNSASEEDHLPLQVLQSP

SEQ ID NO: 35 - DNA, 2559 bp, Gallus gallus
  CDS (1)...(2556)
  ref <308>: DATABASE ACCESSION NUMBER: Genbank AAG28026
  ref <309>: DATABASE ENTRY DATE: 2000-10-31
atggcagaccccgaagacccccgtgatgctggggacgtgctgggggatgactccttcccgctctcctcgctggccaacctgtttgaggtggaggacaccccgtctcctgctgagccatcccggggtccccccggcgctggggatggaaagcaaaacctccggatgaaattccacggggcgttccggaaaggccccccaaaacccatggagctgctggagtccaccatctacgagtcgtcagtggtccctgcacccaaaaaggcccccatggattccctcttcgactacggcacctacaggcagcaccccagcgagaacaaacgctggcgcaggagggtcgtggagaagccggtggctggcaccaaggggccggcacccaacccgccgcccgtcctcaaggtgttcaacagacccatcctcttcgacatcgtctcccgggggtccccagatggcctggagggtctcctctccttcctgctcacccacaagaagcgtctgacggatgaggagttccgagagccctcaacagggaagacgtgcctgcccaaagcgctgctcaacctgagtgctggccggaatgacaccatccccatcctcctcgacatcgccgagaagacgggaaacatgcgggagttcatcaactcacccttccgtgatgtctactacagaggtcagacagcgctgcacatcgccattgagcgccgctgcaagcactacgtggagctgctggtggagaagggtgccgacgtgcacgcccaggcccgtggtcgcttcttccagcccaaggatgagggcggctacttctatttcggagagctgcccctctcactggccgcctgcaccaaccagccccacatcgtgcactatctgacggagaatgggcacaagcaggcagacctgcggcgccaggactcgcgcggcaacaccgtgctgcatgctctggttgccatcgctgacaacacccgtgagaacaccaagtttgtcaccaagatgtacgacctgctcctcatcaagtgcgccaagctcttccccgacaccaacctcgaggccctgctcaacaacgatggcctctctccactcatgatggctgccaagactggcaagatcgggatcttccagcacatcatccgccgggagatcgcagatgaggacgtccggcacctctcgcgcaagttcaaggattgggcatacggccccgtctactcctcactctacgatctctcctcactggatacctgcggggaggaggtgtccgtgttggagatcctcgtttacaacagcaagattgagaaccgccatgagatgttggccgtggagcccatcaacgaactgctgcgcgacaagtggcgcaagttcggtgctgtctccttctacatcagcgtggtctcctacctctgtgccatgatcatcttcaccctcatcgcctattaccgccccatggaaggccccccaccgtacccctacactacaaccatcgactacctgcggctggccggggagatcatcaccctcctcaccggcatcctcttcttcttctccaatatcaaagatctcttcatgaagaagtgcccaggtgtgaactcgttcttcatcgatggctcatttcagctgctctacttcatctactcggtgctggtgatcgtcacggcagggctgtacctgggtggtgtcgaggcttacctggctgtcatggtctttgctttggtcctgggctggatgaatgcgctctacttcacgcgagggctcaagctgacggggacctacagcatcatgatccagaagatcctcttcaaagacctgttccgcttcctcctggtctatctgctattcatgattggctacgcctcagcactggtgtccctcctgaacccgtgtcccagcagcgagtcctgcagtgaggatcactccaactgcacgctgcccacctacccctcatgccgggacagtcagaccttcagcaccttcctgcttgacctcttcaagctcaccattggcatgggtgacctggagatgctggagagtgccaagtaccctggtgtcttcatcatcctgcttgtcacctacatcatcctcaccttcgtgctgctcctcaacatgctcatcgccctcatgggtgagacagtgggccaggtgtccaaggagagcaaacacatctggaagttgcagtgggccaccaccatcctggacatcgagcgctccttccctctcttcctgcggagagcatttcgctctggggagatggtgaccgtggggaagggcactgatgggacccctgaccgccgctggtgcttcagggtggatgaggtgaactggtcccactggaaccagaacctgggcatcatcagcgaggacccgggcaagagcgacacttaccagtactacggcttctcccataccgtggggcggctgcggagagatcgatggtcaacggtggtgccacgcgtggtggagctcaacaagagctgcccaacggaggatgtggttgtgccattggggaccatgggcacggcagaggcgcgggagcgacgacacgggcagacccccagctccccactctag

SEQ ID NO: 36 - protein, 852 aa, Gallus gallus
  ref <308>: DATABASE ACCESSION NUMBER: Genbank AAG28026
  ref <309>: DATABASE ENTRY DATE: 2000-10-31
MADPEDPRDAGDVLGDDSFPLSSLANLFEVEDTPSPAEPSRGPPGAGDGKQNLRMKFHGAFRKGPPKPMELLESTIYESSVVPAPKKAPMDSLFDYGTYRQHPSENKRWRRRVVEKPVAGTKGPAPNPPPVLKVFNRPILFDIVSRGSPDGLEGLLSFLLTHKKRLTDEEFREPSTGKTCLPKALLNLSAGRNDTIPILLDIAEKTGNMREFINSPFRDVYYRGQTALHIAIERRCKHYVELLVEKGADVHAQARGRFFQPKDEGGYFYFGELPLSLAACTNQPHIVHYLTENGHKQADLRRQDSRGNTVLHALVAIADNTRENTKFVTKMYDLLLIKCAKLFPDTNLEALLNNDGLSPLMMAAKTGKIGIFQHIIRREIADEDVRHLSRKFKDWAYGPVYSSLYDLSSLDTCGEEVSVLEILVYNSKIENRHEMLAVEPINELLRDKWRKFGAVSFYISVVSYLCAMIIFTLIAYYRPMEGPPPYPYTTTIDYLRLAGEIITLLTGILFFFSNIKDLFMKKCPGVNSFFIDGSFQLLYFIYSVLVIVTAGLYLGGVEAYLAVMVFALVLGWMNALYFTRGLKLTGTYSIMIQKILFKDLFRFLLVYLLFMIGYASALVSLLNPCPSSESCSEDHSNCTLPTYPSCRDSQTFSTFLLDLFKLTIGMGDLEMLESAKYPGVFIILLVTYIILTFVLLLNMLIALMGETVGQVSKESKHIWKLQWATTILDIERSFPLFLRRAFRSGEMVTVGKGTDGTPDRRWCFRVDEVNWSHWNQNLGIISEDPGKSDTYQYYGFSHTVGRLRRDRWSTVVPRVVELNKSCPTEDVVVPLGTMGTAEARERRHGQTPSSPL

SEQ ID NO: 37 - DNA, 2517 bp, Rattus norvegicus
  CDS (1)...(2514)
  ref <308>: DATABASE ACCESSION NUMBER: Genbank BAA94307
  ref <309>: DATABASE ENTRY DATE: 2002-07-04
atggaacaacgggctagcttagactcagaggagtctgagtccccaccccaagataactcctgcctggaccctccagacagagaccctaactgcaagccacctccagtcaagccccacatcttcactaccaggagtcgtacccggctttttgggaagggtgactcggaggaggcctctcccctggactgcccttatgaggaaggcgggctggcttcctgccctatcatcactgtcagctctgttctaactatccagaggcctggggatggacctgccagtgtcaggcagtcatcccaggactccgtctccgctggtgagaagcccccgaggctctatgatcgcaggagcatcttcgatgctgtggctcagagtaactgccaggagctggagagcctgctgcccttcctgcagaggagcaagaagcgcctgactgacagcgagttcaaagacccagagacaggaaagacctgtctgctaaaagccatgctcaatctgcacaatgggcagaatgacaccatcgctctgctcctggacgttgcccggaagacagacagcctgaagcagtttgtcaatgccagctacacagacagctactacaagggccagacagcactgcacattgccattgaacggcggaacatgacgctggtgaccctcttggtggagaatggagcagatgtccaggctgcggctaacggggacttcttcaagaaaaccaaagggaggcctggcttctactttggtgagctgcccctgtccctggctgcgtgcaccaaccagctggccattgtgaagttcctgctgcagaactcctggcagcctgcagacatcagcgcccgggactcagtgggcaacacggtgcttcatgccctggtggaggtggcagataacacagttgacaacaccaagttcgtgacaagcatgtacaacgagatcttgatcctgggggccaaactccaccccacgctgaagctggaagagatcaccaacaggaaggggctcacgccactggctctggctgctagcagtgggaagatcggggtcttggcctacattctccagagggagatccatgaacccgagtgccgacacctatccaggaagttcaccgaatgggcctatgggccagtgcactcctccctttatgacctgtcctgcattgacacctgtgaaaagaactcggttctggaggtgatcgcttacagcagcagtgagacccctaaccgtcatgacatgcttctcgtggaacccttgaaccgactcctacaggacaagtgggacagatttgtcaagcgcatcttctacttcaacttcttcgtttactgcttgtatatgatcatcttcaccgcggctgcctactatcggcctgtggaaggcttgcccccctataagctgaaaaacaccgttggggactatttccgagtcaccggagagatcttgtctgtgtcaggaggagtctacttcttcttccgagggattcaatatttcctgcagaggcgaccatccctcaagagtttgtttgtggacagctacagtgagatacttttctttgtacagtcgctgttcatgctggtgtctgtggtactgtacttcagccaacgcaaggagtatgtggcttccatggtgttctccctggccatgggctggaccaacatgctctactatacccgaggattccagcagatgggcatctatgctgtcatgattgagaagatgatcctcagagacctgtgccggtttatgttcgtctacctcgtgttcttgtttggattttccacagctgtggtgacactgattgaggatgggaagaataactctctgcctatggagtccacaccacacaagtgccgggggtctgcctgcaagccaggtaactcttacaacagcctgtattccacatgtctggagctgttcaagttcaccatcggcatgggcgacctggagttcactgagaactacgacttcaaggctgtcttcatcatcctgttactggcctatgtgattctcacctacatccttctgctcaacatgctcattgctctcatgggtgagaccgtcaacaagattgcacaagagagcaagaacatctggaagctgcagagagccatcaccatcctggatacagagaagagcttcctgaagtgcatgaggaaggccttccgctctggcaagctgctgcaggtggggttcactcctgacggcaaggatgactaccggtggtgtttcagggtggacgaggtaaactggactacctggaacaccaatgtgggtatcatcaacgaggacccaggcaactgtgagggcgtcaagcgcaccctgagcttctccctgaggtcaggccgagtttcagggagaaactggaagaactttgccctggttccccttctgagggatgcaagcactcgagatagacatgccacccagcaggaagaagttcaactgaagcattatacgggatcccttaagccagaggatgctgaggttttcaaggattccatggtcccaggggagaaataa

SEQ ID NO: 38 - protein, 838 aa, Rattus norvegicus
  ref <308>: DATABASE ACCESSION NUMBER: Genbank BAA94307
  ref <309>: DATABASE ENTRY DATE: 2002-07-04
MEQRASLDSEESESPPQDNSCLDPPDRDPNCKPPPVKPHIFTTRSRTRLFGKGDSEEASPLDCPYEEGGLASCPIITVSSVLTIQRPGDGPASVRQSSQDSVSAGEKPPRLYDRRSIFDAVAQSNCQELESLLPFLQRSKKRLTDSEFKDPETGKTCLLKAMLNLHNGQNDTIALLLDVARKTDSLKQFVNASYTDSYYKGQTALHIAIERRNMTLVTLLVENGADVQAAANGDFFKKTKGRPGFYFGELPLSLAACTNQLAIVKFLLQNSWQPADISARDSVGNTVLHALVEVADNTVDNTKFVTSMYNEILILGAKLHPTLKLEEITNRKGLTPLALAASSGKIGVLAYILQREIHEPECRHLSRKFTEWAYGPVHSSLYDLSCIDTCEKNSVLEVIAYSSSETPNRHDMLLVEPLNRLLQDKWDRFVKRIFYFNFFVYCLYMIIFTAAAYYRPVEGLPPYKLKNTVGDYFRVTGEILSVSGGVYFFFRGIQYFLQRRPSLKSLFVDSYSEILFFVQSLFMLVSVVLYFSQRKEYVASMVFSLAMGWTNMLYYTRGFQQMGIYAVMIEKMILRDLCRFMFVYLVFLFGFSTAVVTLIEDGKNNSLPMESTPHKCRGSACKPGNSYNSLYSTCLELFKFTIGMGDLEFTENYDFKAVFIILLLAYVILTYILLLNMLIALMGETVNKIAQESKNIWKLQRAITILDTEKSFLKCMRKAFRSGKLLQVGFTPDGKDDYRWCFRVDEVNWTTWNTNVGIINEDPGNCEGVKRTLSFSLRSGRVSGRNWKNFALVPLLRDASTRDRHATQQEEVQLKHYTGSLKPEDAEVFKDSMVPGEK

SEQ ID NO: 39 - DNA, 2517 bp, Rattus norvegicus
  CDS (1)...(2514)
  ref <308>: DATABASE ACCESSION NUMBER: Genbank AAC53398
  ref <309>: DATABASE ENTRY DATE: 1997-10-30
atggaacaacgggctagcttagactcagaggagtctgagtccccaccccaagagaactcctgcctggaccctccagacagagaccctaactgcaagccacctccagtcaagccccacatcttcactaccaggagtcgtacccggctttttgggaagggtgactcggaggaggcctctcccctggactgcccttatgaggaaggcgggctggcttcctgccctatcatcactgtcagctctgttctaactatccagaggcctggggatggacctgccagtgtcaggccgtcatcccaggactccgtctccgctggtgagaagcccccgaggctctatgatcgcaggagcatcttcgatgctgtggctcagagtaactgccaggagctggagagcctgctgcccttcctgcagaggagcaagaagcgcctgactgacagcgagttcaaagacccagagacaggaaagacctgtctgctaaaagccatgctcaatctgcacaatgggcagaatgacaccatcgctctgctcctggacgttgcccggaagacagacagcctgaagcagtttgtcaatgccagctacacagacagctactacaagggccagacagcactgcacattgccattgaacggcggaacatgacgctggtgaccctcttggtggagaatggagcagatgtccaggctgcggctaacggggacttcttcaagaaaaccaaagggaggcctggcttctactttggtgagctgcccctgtccctggctgcgtgcaccaaccagctggccattgtgaagttcctgctgcagaactcctggcagcctgcagacatcagcgcccgggactcagtgggcaacacggtgcttcatgccctggtggaggtggcagataacacagttgacaacaccaagttcgtgacaagcatgtacaacgagatcttgatcctgggggccaaactccaccccacgctgaagctggaagagatcaccaacaggaaggggctcacgccactggctctggctgctagcagtgggaagatcggggtcttggcctacattctccagagggagatccatgaacccgagtgccgacacctatccaggaagttcaccgaatgggcctatgggccagtgcactcctccctttatgacctgtcctgcattgacacctgtgaaaagaactcggttctggaggtgatcgcttacagcagcagtgagacccctaaccgtcatgacatgcttctcgtggaacccttgaaccgactcctacaggacaagtgggacagatttgtcaagcgcatcttctacttcaacttcttcgtctactgcttgtatatgatcatcttcaccgcggctgcctactatcggcctgtggaaggcttgcccccctataagctgaaaaacaccgttggggactatttccgagtcaccggagagatcttgtctgtgtcaggaggagtctacttcttcttccgagggattcaatatttcctgcagaggcgaccatccctcaagagtttgtttgtggacagctacagtgagatacttttctttgtacagtcgctgttcatgctggtgtctgtggtactgtacttcagccaacgcaaggagtatgtggcttccatggtgttctccctggccatgggctggaccaacatgctctactatacccgaggattccagcagatgggcatctatgctgtcatgattgagaagatgatcctcagagacctgtgccggtttatgttcgtctacctcgtgttcttgtttggattttccacagctgtggtgacactgattgaggatgggaagaataactctctgcctatggagtccacaccacacaagtgccgggggtctgcctgcaagccaggtaactcttacaacagcctgtattccacatgtctggagctgttcaagttcaccatcggcatgggcgacctggagttcactgagaactacgacttcaaggctgtcttcatcatcctgttactggcctatgtgattctcacctacatccttctgctcaacatgctcattgctctcatgggtgagaccgtcaacaagattgcacaagagagcaagaacatctggaagctgcagagagccatcaccatcctggatacagagaagagcttcctgaagtgcatgaggaaggccttccgctctggcaagctgctgcaggtggggttcactcctgacggcaaggatgactaccggtggtgtttcagggtggacgaggtaaactggactacctggaacaccaatgtgggtatcatcaacgaggacccaggcaactgtgagggcgtcaagcgcaccctgagcttctccctgaggtcaggccgagtttcagggagaaactggaagaactttgccctggttccccttctgagggatgcaagcactcgagatagacatgccacccagcaggaagaagttcaactgaagcattatacgggatcccttaagccagaggatgctgaggttttcaaggattccatggtcccaggggagaaataa

SEQ ID NO: 40 - protein, 838 aa, Rattus norvegicus
  ref <308>: DATABASE ACCESSION NUMBER: Genbank AAC53398
  ref <309>: DATABASE ENTRY DATE: 1997-10-30
MEQRASLDSEESESPPQENSCLDPPDRDPNCKPPPVKPHIFTTRSRTRLFGKGDSEEASPLDCPYEEGGLASCPIITVSSVLTIQRPGDGPASVRPSSQDSVSAGEKPPRLYDRRSIFDAVAQSNCQELESLLPFLQRSKKRLTDSEFKDPETGKTCLLKAMLNLHNGQNDTIALLLDVARKTDSLKQFVNASYTDSYYKGQTALHIAIERRNMTLVTLLVENGADVQAAANGDFFKKTKGRPGFYFGELPLSLAACTNQLAIVKFLLQNSWQPADISARDSVGNTVLHALVEVADNTVDNTKFVTSMYNEILILGAKLHPTLKLEEITNRKGLTPLALAASSGKIGVLAYILQREIHEPECRHLSRKFTEWAYGPVHSSLYDLSCIDTCEKNSVLEVIAYSSSETPNRHDMLLVEPLNRLLQDKWDRFVKRIFYFNFFVYCLYMIIFTAAAYYRPVEGLPPYKLKNTVGDYFRVTGEILSVSGGVYFFFRGIQYFLQRRPSLKSLFVDSYSEILFFVQSLFMLVSVVLYFSQRKEYVASMVFSLAMGWTNMLYYTRGFQQMGIYAVMIEKMILRDLCRFMFVYLVFLFGFSTAVVTLIEDGKNNSLPMESTPHKCRGSACKPGNSYNSLYSTCLELFKFTIGMGDLEFTENYDFKAVFIILLLAYVILTYILLLNMLIALMGETVNKIAQESKNIWKLQRAITILDTEKSFLKCMRKAFRSGKLLQVGFTPDGKDDYRWCFRVDEVNWTTWNTNVGIINEDPGNCEGVKRTLSFSLRSGRVSGRNWKNFALVPLLRDASTRDRHATQQEEVQLKHYTGSLKPEDAEVFKDSMVPGEK

SEQ ID NO: 41 - DNA, 2520 bp, Homo sapiens
  CDS (1)...(2517)
  ref <308>: DATABASE ACCESSION NUMBER: Genbank CAB95729
  ref <309>: DATABASE ENTRY DATE: 2000-11-22
atgaagaaatggagcagcacagacttgggggcagctgcggacccactccaaaaggacacctgcccagaccccctggatggagaccctaactccaggccacctccagccaagccccagctctccacggccaagagccgcacccggctctttgggaagggtgactcggaggaggctttcccggtggattgccctcacgaggaaggtgagctggactcctgcccgaccatcacagtcagccctgttatcaccatccagaggccaggagacggccccaccggtgccaggctgctgtcccaggactctgtcgccgccagcaccgagaagaccctcaggctctatgatcgcaggagtatctttgaagccgttgctcagaataactgccaggatctggagagcctgctgctcttcctgcagaagagcaagaagcacctcacagacaacgagttcaaagaccctgagacagggaagacctgtctgctgaaagccatgctcaacctgcacgacggacagaacaccaccatccccctgctcctggagatcgcgcggcaaacggacagcctgaaggagcttgtcaacgccagctacacggacagctactacaagggccagacagcactgcacatcgccatcgagagacgcaacatggccctggtgaccctcctggtggagaacggagcagacgtccaggctgcggcccatggggacttctttaagaaaaccaaagggcggcctggattctacttcggtgaactgcccctgtccctggccgcgtgcaccaaccagctgggcatcgtgaagttcctgctgcagaactcctggcagacggccgacatcagcgccagggactcggtgggcaacacggtgctgcacgccctggtggaggtggccgacaacacggccgacaacacgaagtttgtgacgagcatgtacaatgagattctgatcctgggggccaaactgcacccgacgctgaagctggaggagctcaccaacaagaagggaatgacgccgctggctctggcagctgggaccgggaagatcggggtcttggcctatattctccagcgggagatccaggagcccgagtgcaggcacctgtccaggaagttcaccgagtgggcctacgggcccgtgcactcctcgctgtacgacctgtcctgcatcgacacctgcgagaagaactcggtgctggaggtgatcgcctacagcagcagcgagacccctaatcgccacgacatgctcttggtggagccgctgaaccgactcctgcaggacaagtgggacagattcgtcaagcgcatcttctacttcaacttcctggtctactgcctgtacatgatcatcttcaccatggctgcctactacaggcccgtggatggcttgcctccctttaagatggaaaaaactggagactatttccgagttactggagagatcctgtctgtgttaggaggagtctacttctttttccgagggattcagtatttcctgcagaggcggccgtcgatgaagaccctgtttgtggacagctacagtgagatgcttttctttctgcagtcactgttcatgctggccaccgtggtgctgtacttcagccacctcaaggagtatgtggcttccatggtattctccctggccttgggctggaccaacatgctctactacacccgcggtttccagcagatgggcatctatgccgtcatgatagagaagatgatcctgagagacctgtgccgtttcatgtttgtctacgtcgtcttcttgttcgggttttccacagcggtggtgacgctgattgaagacgggaagaatgactccctgccgtctgagtccacgtcgcacaggtggcgggggcctgcctgcaggccccccgatagctcctacaacagcctgtactccacctgcctggagctgttcaagttcaccatcggcatgggcgacctggagttcactgagaactatgacttcaaggctgtcttcatcatcctgctgctggcctatgtaattctcacctacatcctcctgctcaacatgctcatcgccctcatgggtgagactgtcaacaagatcgcacaggagagcaagaacatctggaagctgcagagagccatcaccatcctggacacggagaagagcttccttaagtgcatgaggaaggccttccgctcaggcaagctgctgcaggtggggtacacacctgatggcaaggacgactaccggtggtgcttcagggtggacgaggtgaactggaccacctggaacaccaacgtgggcatcatcaacgaagacccgggcaactgtgagggcgtcaagcgcaccctgagcttctccctgcggtcaagcagagtttcaggcagacactggaagaactttgccctggtcccccttttaagagaggcaagtgctcgagataggcagtctgctcagcccgaggaagtttatctgcgacagttttcagggtctctgaagccagaggacgctgaggtcttcaagagtcctgccgcttccggggagaagtga

SEQ ID NO: 42 - protein, 839 aa, Homo sapiens [sequence omitted]

SEQ ID NO: 43 - DNA, 1935 bp, Homo sapiens
  CDS (1)...(1932)
  ref <308>: DATABASE ACCESSION NUMBER: Genbank XP_054949
  ref <309>: DATABASE ENTRY DATE: 2002-02-07
atgaaggctgtgctgaaccttaaggacggagtcaatgcctgcattctgccactgctgcagatcgacagggactctggcaatcctcagcccctggtaaatgcccagtgcacagatgactattaccgaggccacagcgctctgcacatcgccattgagaagaggagtctgcagtgtgtgaagctcctggtggagaatggggccaatgtgcatgcccgggcctgcggccgcttcttccagaagggccaagggacttgcttttatttcggtgagctacccctctctttggccgcttgcaccaagcagtgggatgtggtaagctacctcctggagaacccacaccagcccgccagcctgcaggccactgactcccagggcaacacagtcctgcatgccctagtgatgatctcggacaactcagctgagaacattgcactggtgaccagcatgtatgatgggctcctccaagctggggcccgcctctgccctaccgtgcagcttgaggacatccgcaacctgcaggatctcacgcctctgaagctggccgccaaggagggcaagatcgagattttcaggcacatcctgcagcgggagttttcaggactgagccacctttcccgaaagttcaccgagtggtgctatgggcctgtccgggtgtcgctgtatgacctggcttctgtggacagctgtgaggagaactcagtgctggagatcattgcctttcattgcaagagcccgcaccgacaccgaatggtcgttttggagcccctgaacaaactgctgcaggcgaaatgggatctgctcatccccaagttcttcttaaacttcctgtgtaatctgatctacatgttcatcttcaccgctgttgcctaccatcagcctaccctgaagaagcaggccgcccctcacctgaaagcggaggttggaaactccatgctgctgacgggccacatccttatcctgctaggggggatctacctcctcgtgggccagctgtggtacttctggcggcgccacgtgttcatctggatctcgttcatagacagctactttgaaatcctcttcctgttccaggccctgctcacagtggtgtcccaggtgctgtgtttcctggccatcgagtggtacctgcccctgcttgtgtctgcgctggtgctgggctggctgaacctgctttactatacacgtggcttccagcacacaggcatctacagtgtcatgatccagaaggtcatcctgcgggacctgctgcgcttccttctgatctacttagtcttccttttcggcttcgctgtagccctggtgagcctgagccaggaggcttggcgccccgaagctcctacaggccccaatgccacagagtcagtgcagcccatggagggacaggaggacgagggcaacggggcccagtacaggggtatcctggaagcctccttggagctcttcaaattcaccatcggcatgggcgagctggccttccaggagcagctgcacttccgcggcatggtgctgctgctgctgctggcctacgtgctgctcacctacatcctgctgctcaacatgctcatcgccctcatgagcgagaccgtcaacagtgtcgccactgacagctggagcatctggaagctgcagaaagccatctctgtcctggagatggagaatggctattggtggtgcaggaagaagcagcgggcaggtgtgatgctgaccgttggcactaagccagatggcagccccgatgagcgctggtgcttcagggtggaggaggtgaactgggcttcatgggagcagacgctgcctacgctgtgtgaggacccgtcaggggcaggtgtccctcgaactctcgagaaccctgtcctggcttcccctcccaaggaggatgaggatggtgcctctgaggaaaactatgtgcccgtccagctcctccagtccaactga

SEQ ID NO: 44 - protein, 644 aa, Homo sapiens
  ref <308>: DATABASE ACCESSION NUMBER: Genbank XP_054949
  ref <309>: DATABASE ENTRY DATE: 2002-02-07
MKAVLNLKDGVNACILPLLQIDRDSGNPQPLVNAQCTDDYYRGHSALHIAIEKRSLQCVKLLVENGANVHARACGRFFQKGQGTCFYFGELPLSLAACTKQWDVVSYLLENPHQPASLQATDSQGNTVLHALVMISDNSAENIALVTSMYDGLLQAGARLCPTVQLEDIRNLQDLTPLKLAAKEGKIEIFRHILQREFSGLSHLSRKFTEWCYGPVRVSLYDLASVDSCEENSVLEIIAFHCKSPHRHRMVVLEPLNKLLQAKWDLLIPKFFLNFLCNLIYMFIFTAVAYHQPTLKKQAAPHLKAEVGNSMLLTGHILILLGGIYLLVGQLWYFWRRHVFIWISFIDSYFEILFLFQALLTVVSQVLCFLAIEWYLPLLVSALVLGWLNLLYYTRGFQHTGIYSVMIQKVILRDLLRFLLIYLVFLFGFAVALVSLSQEAWRPEAPTGPNATESVQPMEGQEDEGNGAQYRGILEASLELFKFTIGMGELAFQEQLHFRGMVLLLLLAYVLLTYILLLNMLIALMSETVNSVATDSWSIWKLQKAISVLEMENGYWWCRKKQRAGVMLTVGTKPDGSPDERWCFRVEEVNWASWEQTLPTLCEDPSGAGVPRTLENPVLASPPKEDEDGASEENYVPVQLLQSN

SEQ ID NO: 45 - DNA, 2286 bp, Rattus norvegicus
  CDS (1)...(2283)
  ref <308>: DATABASE ACCESSION NUMBER: Genbank AAD26364
  ref <309>: DATABASE ENTRY DATE: 1999-04-07
atgacttcagcctccagccccccagctttcaggctggagacttccgatggagatgaagagggcaatgctgaggtgaacaaggggaagcaggaaccgccccccatggagtcaccattccagagggaggaccggaattcctcccctcagatcaaagtgaacctcaacttcataaagagacctcctaaaaacacttctgctcccagccagcaggagccagatcggtttgaccgtgaccgactcttcagtgtggtctcccggggtgtccccgaggaactgactggactgctagaatacctgcgctggaacagcaagtacctcactgactctgcatacacagaaggctccactggaaagacgtgcctgatgaaggctgtgctgaaccttcaggatggggtcaatgcctgcatcatgccgctgctgcagattgacaaggattccggcaatcccaagcccctcgtcaatgcccagtgcaccgatgagttctaccaaggccacagtgcgctgcacatcgccatagagaagaggagcctgcagtgcgtgaagctgctggtagagaatggagcggatgttcacctccgagcctgtggccgcttcttccaaaagcaccaaggaacttgtttctattttggagagctacctctttctctggctgcgtgcaccaagcagtgggatgtggtgacctacctcctggagaacccacaccagccggccagcctggaggccaccgactccctgggcaacacagtcctgcatgctctggtaatgattgcagataactcgcctgagaacagtgccctggtgatccacatgtacgacgggcttctacaaatgggggcgcgcctctgccccactgtgcagcttgaggaaatctccaaccaccaaggcctcacacccctgaaactagccgccaaggaaggcaaaatcgagattttcaggcacattctgcagcgggaattctcaggaccgtaccagcccctttcccgaaagtttactgagtggtgttacggtcctgtgcgggtatcgctgtacgacctgtcctctgtggacagctgggaaaagaactcggtgctggagatcatcgcttttcattgcaagagcccgaaccggcaccgcatggtggttttagaaccactgaacaagcttctgcaggagaaatgggatcggctcgtctcaagattcttcttcaacttcgcctgctacttggtctacatgttcatcttcaccgtcgttgcctaccaccagccttccctggatcagccagccatcccctcatcaaaagcgacttttggggaatccatgctgctgctgggccacattctgatcctgcttgggggtatttacctcttactgggccagctgtggtacttttggcggcggcgcctgtttatctggatctcattcatggacagctactttgaaatcctctttctccttcaggctctgctcacagtgctgtcccaggtgctgcgcttcatggagactgaatggtacctacccctgctagtgttatccctagtgctgggctggctgaacctgctttactacacacggggctttcagcacacaggcatctacagtgtcatgatccagaaggtcatccttcgagacctgctccgtttcctgctggtctacctggtcttccttttcggctttgctgtagccctagtaagcttgagcagagaggcccgaagtcccaaagcccctgaagataacaactccacagtgacggaacagcccacggtgggccaggaggaggagccagctccatatcggagcattctggatgcctccctagagctgttcaagttcaccattggtatgggggagctggctttccaggaacagctgcgttttcgtggggtggtcctgctgttgctgttggcctacgtccttctcacctacgtcctgctgctcaacatgctcattgctctcatgagcgaaactgtcaaccacgttgctgacaacagctggagcatctggaagttgcagaaagccatctctgtcttggagatggagaatggttactggtggtgccggaggaagaaacatcgtgaagggaggctgctgaaagtcggcaccaggggggatggtacccctgatgagcgctggtgcttcagggtggaggaagtaaattgggctgcttgggagaagactcttcccaccttatctgaggatccatcagggccaggcatcactggtaataaaaagaacccaacctctaaaccggggaagaacagtgcctcagaggaagaccatctgccccttcaggtcctccagtccccctga

SEQ ID NO: 46 - protein, 761 aa, Rattus norvegicus
  ref <308>: DATABASE ACCESSION NUMBER: Genbank AAD26364
  ref <309>: DATABASE ENTRY DATE: 1999-04-07
MTSASSPPAFRLETSDGDEEGNAEVNKGKQEPPPMESPFQREDRNSSPQIKVNLNFIKRPPKNTSAPSQQEPDRFDRDRLFSVVSRGVPEELTGLLEYLRWNSKYLTDSAYTEGSTGKTCLMKAVLNLQDGVNACIMPLLQIDKDSGNPKPLVNAQCTDEFYQGHSALHIAIEKRSLQCVKLLVENGADVHLRACGRFFQKHQGTCFYFGELPLSLAACTKQWDVVTYLLENPHQPASLEATDSLGNTVLHALVMIADNSPENSALVIHMYDGLLQMGARLCPTVQLEEISNHQGLTPLKLAAKEGKIEIFRHILQREFSGPYQPLSRKFTEWCYGPVRVSLYDLSSVDSWEKNSVLEIIAFHCKSPNRHRMVVLEPLNKLLQEKWDRLVSRFFFNFACYLVYMFIFTVVAYHQPSLDQPAIPSSKATFGESMLLLGHILILLGGIYLLLGQLWYFWRRRLFIWISFMDSYFEILFLLQALLTVLSQVLRFMETEWYLPLLVLSLVLGWLNLLYYTRGFQHTGIYSVMIQKVILRDLLRFLLVYLVFLFGFAVALVSLSREARSPKAPEDNNSTVTEQPTVGQEEEPAPYRSILDASLELFKFTIGMGELAFQEQLRFRGVVLLLLLAYVLLTYVLLLNMLIALMSETVNHVADNSWSIWKLQKAISVLEMENGYWWCRRKKHREGRLLKVGTRGDGTPDERWCFRVEEVNWAAWEKTLPTLSEDPSGPGITGNKKNPTSKPGKNSASEEDHLPLQVLQSP

SEQ ID NO: 47 - DNA, 2520 bp, Homo sapiens
  CDS (1)...(2517)
  ref <308>: DATABASE ACCESSION NUMBER: Genbank XP_008512
  ref <309>: DATABASE ENTRY DATE: 2002-02-07
atgaagaaatggagcagcacagacttgggggcagctgcggacccactccaaaaggacacctgcccagaccccctggatggagaccctaactccaggccacctccagccaagccccagctctccacggccaagagccgcacccggctctttgggaagggtgactcggaggaggctttcccggtggattgccctcacgaggaaggtgagctggactcctgcccgaccatcacagtcagccctgttatcaccatccagaggccaggagacggctccaccggtgccaggctgctgtcccaggactctgtcgccgccagcaccgagaagaccctcaggctctatgatcgcaggagtatctttgaagccgttgctcagaataactgccaggatctggagagcctgctgctcttcctgcagaagagcaagaagcacctcacagacaacgagttcaaagaccctgagacagggaagacctgtctgctgaaagccatgctcaacctgcatgacggacagaacaccaccatccccctgctcctggagatcgcgcggcaaacggacagcctgaaggagcttgtcaacgccagctacacggacagctactacaagggccagacagcactgcacatcgccatcgagagacgcaacatggccctggtgaccctcctggtggagaacggagcagacgtccaggctgcggcccatggggacttctttaagaaaaccaaagggcggcctggattctacttcggtgaactgcccctgtccctggccgcgtgcaccaaccagctgggcatcgtgaagttcctgctgcagaactcctggcagacggccgacatcagcgccagggactcggtgggcaacacggtgctgcacgccctggtggaggtggccgacaacacggccgacaacacgaagtttgtgacgagcatgtacaatgagattctgatcctgggggccaaactgcacccgacgctgaagctggaggagctcaccaacaagaagggaatgacgccgctggctctggcagctgggaccgggaagatcggggtcttggcctatattctccagcgggagatccaggagcccgagtgcaggcacctgtccaggaagttcaccgagtgggcctacgggcccgtgcactcctcgctgtacgacctgtcctgcatcgacacctgcgagaagaactcggtgctggaggtgatcgcctacagcagcagcgagacccctaatcgccacgacatgctcttggtggagccgctgaaccgactcctgcaggacaagtgggacagattcgtcaagcgcatcttctacttcaacttcctggtctactgcctgtacatgatcatcttcaccatggctgcctactacaggcccgtggatggcttgcctccctttaagatggaaaaaattggagactatttccgagttactggagagatcctgtctgtgttaggaggagtctacttctttttccgagggattcagtatttcctgcagaggcggccgtcgatgaagaccctgtttgtggacagctacagtgagatgcttttctttctgcagtcactgttcatgctggccaccgtggtgctgtacttcagccacctcaaggagtatgtggcttccatggtattctccctggccttgggctggaccaacatgctctactacacccgcggtttccagcagatgggcatctatgccgtcatgatagagaagatgatcctgagagacctgtgccgtttcatgtttgtctacatcgtcttcttgttcgggttttccacagcggtggtgacgctgattgaagacgggaagaatgactccctgccgtctgagtccacgtcgcacaggtggcgggggcctgcctgcaggccccccgatagctcctacaacagcctgtactccacctgcctggagctgttcaagttcaccatcggcatgggcgacctggagttcactgagaactatgacttcaaggctgtcttcatcatcctgctgctggcctatgtaattctcacctacatcctcctgctcaacatgctcatcgccctcatgggtgagactgtcaacaagatcgcacaggagagcaagaacatctggaagctgcagagagccatcaccatcctggacacggagaagagcttccttaagtgcatgaggaaggccttccgctcaggcaagctgctgcaggtggggtacacacctgatggcaaggacgactaccggtggtgcttcagggtggacgaggtgaactggaccacctggaacaccaacgtgggcatcatcaacgaagacccgggcaactgtgagggcgtcaagcgcaccctgagcttctccctgcggtcaagcagagtttcaggcagacactggaagaactttgccctggtcccccttttaagagaggcaagtgctcgagataggcagtctgctcagcccgaggaagtttatctgcgacagttttcagggtctctgaagccagaggacgctgaggtcttcaagagtcctgccgcttccggggagaagtga

SEQ ID NO: 48 - protein, 839 aa, Homo sapiens
  ref <308>: DATABASE ACCESSION NUMBER: Genbank XP_008512
  ref <309>: DATABASE ENTRY DATE: 2002-02-07
MKKWSSTDLGAAADPLQKDTCPDPLDGDPNSRPPPAKPQLSTAKSRTRLFGKGDSEEAFPVDCPHEEGELDSCPTITVSPVITIQRPGDGSTGARLLSQDSVAASTEKTLRLYDRRSIFEAVAQNNCQDLESLLLFLQKSKKHLTDNEFKDPETGKTCLLKAMLNLHDGQNTTIPLLLEIARQTDSLKELVNASYTDSYYKGQTALHIAIERRNMALVTLLVENGADVQAAAHGDFFKKTKGRPGFYFGELPLSLAACTNQLGIVKFLLQNSWQTADISARDSVGNTVLHALVEVADNTADNTKFVTSMYNEILILGAKLHPTLKLEELTNKKGMTPLALAAGTGKIGVLAYILQREIQEPECRHLSRKFTEWAYGPVHSSLYDLSCIDTCEKNSVLEVIAYSSSETPNRHDMLLVEPLNRLLQDKWDRFVKRIFYFNFLVYCLYMIIFTMAAYYRPVDGLPPFKMEKIGDYFRVTGEILSVLGGVYFFFRGIQYFLQRRPSMKTLFVDSYSEMLFFLQSLFMLATVVLYFSHLKEYVASMVFSLALGWTNMLYYTRGFQQMGIYAVMIEKMILRDLCRFMFVYIVFLFGFSTAVVTLIEDGKNDSLPSESTSHRWRGPACRPPDSSYNSLYSTCLELFKFTIGMGDLEFTENYDFKAVFIILLLAYVILTYILLLNMLIALMGETVNKIAQESKNIWKLQRAITILDTEKSFLKCMRKAFRSGKLLQVGYTPDGKDDYRWCFRVDEVNWTTWNTNVGIINEDPGNCEGVKRTLSFSLRSSRVSGRHWKNFALVPLLREASARDRQSAQPEEVYLRQFSGSLKPEDAEVFKSPAASGEK

SEQ ID NO: 49 - DNA, 2520 bp, Homo sapiens
  CDS (1)...(2517)
  ref <308>: DATABASE ACCESSION NUMBER: Genbank CAB89866
  ref <309>: DATABASE ENTRY DATE: 2001-09-01
atgaagaaatggagcagcacagacttgggggcagctgcggacccactccaaaaggacacctgcccagaccccctggatggagaccctaactccaggccacctccagccaagccccagctctccacggccaagagccgcacccggctctttgggaagggtgactcggaggaggctttcccggtggattgccctcacgaggaaggtgagctggactcctgcccgaccatcacagtcagccctgttatcaccatccagaggccaggagacggccccaccggtgccaggctgctgtcccaggactctgtcgccgccagcaccgagaagaccctcaggctctatgatcgcaggagtatctttgaagccgttgctcagaataactgccaggatctggagagcctgctgctcttcctgcagaagagcaagaagcacctcacagacaacgagttcaaagaccctgagacagggaagacctgtctgctgaaagccatgctcaacctgcacgacggacagaacaccaccatccccctgctcctggagatcgcgcggcaaacggacagcctgaaggagcttgtcaacgccagctacacggacagctactacaagggccagacagcactgcacatcgccatcgagagacgcaacatggccctggtgaccctcctggtggagaacggagcagacgtccaggctgcggcccatggggacttctttaagaaaaccaaagggcggcctggattctacttcggtgaactgcccctgtccctggccgcgtgcaccaaccagctgggcatcgtgaagttcctgctgcagaactcctggcagacggccgacatcagcgccagggactcggtgggcaacacggtgctgcacgccctggtggaggtggccgacaacacggccgacaacacgaagtttgtgacgagcatgtacaatgagattctgatcctgggggccaaactgcacccgacgctgaagctggaggagctcaccaacaagaagggaatgatgccgctggctctggcagctgggaccgggaagatcggggtcttggcctatattctccagcgggagatccaggagcccgagtgcaggcacctgtccaggaagttcaccgagtgggcctacgggcccgtgcactcctcgctgtacgacctgtcctgcatcgacacctgcgagaagaactcggtgctggaggtgatcgcctacagcagcagcgagacccctaatcgccacgacatgctcttggtggagccgctgaaccgactcctgcaggacaagtgggacagattcgtcaagcgcatcttctacttcaacttcctggtctactgcctgtacatgatcatcttcaccatggctgcctactacaggcccgtggatggcttgcctccctttaagatggaaaaaactggagactatttccgagttactggagagatcctgtctgtgttaggaggagtctacttctttttccgagggattcagtatttcctgcagaggcggccgtcgatgaagaccctgtttgtggacagctacagtgagatgcttttctttctgcagtcactgttcatgctggccaccgtggtgctgtacttcagccacctcaaggagtatgtggcttccatggtattctccctggccttgggctggaccaacatgctctactacacccgcggtttccagcagatgggcatctatgccgtcatgatagagaagatgatcctgagagacctgtgccgtttcatgtttgtctacatcgtcttcttgttcgggttttccacagcggtggtgacgctgattgaagacgggaagaatgactccctgccgtctgagtccacgtcgcacaggtggcgggggcctgcctgcaggccccccgatagctcctacaacagcctgtactccacctgcctggagctgttcaagttcaccatcggcatgggcgacctggagttcactgagaactatgacttcaaggctgtcttcatcatcctgctgctggcctatgtaattctcacctacatcctcctgctcaacatgctcatcgccctcatgggtgagactgtcaacaagatcgcacaggagagcaagaacatctggaagctgcagagagccatcaccatcctggacacggagaagagcttccttaagtgcatgaggaaggccttccgctcaggcaagctgctgcaggtggggtacacacctgatggcaaggacgactaccggtggtgcttcagggtggacgaggtgaactggaccacctggaacaccaacgtgggcatcatcaacgaagacccgggcaactgtgagggcgtcaagcgcaccctgagcttctccctgcggtcaagcagagtttcaggcagacactggaagaactttgccctggtcccccttttaagagaggcaagtgctcgagataggcagtctgctcagcccgaggaagtttatctgcgacagttttcagggtctctgaagccagaggacgctgaggtcttcaagagtcctgccgcttccggggagaagtga

SEQ ID NO: 50 - protein, 839 aa, Homo sapiens [sequence omitted]

SEQ ID NO: 51 - DNA, 2271 bp, Mus musculus
  CDS (1)...(2268)
  ref <308>: DATABASE ACCESSION NUMBER: Genbank AAH05415
  ref <309>: DATABASE ENTRY DATE: 2002-09-20
atgacttcagcctccaaccccccagcttttaggctggagacgtccgatggagatgaagaaggcagtgctgaggtgaacaaaggaaagaatgagccaccccccatggagtctcccttccagggagaggaccggaacttctcccctcagattaaagtgaatctcaactaccgaaagggactgggtcccagccaacaggacccaaatcggtttgaccgtgaccgactcttcagtgtggtctcccggggtgtccccgaggagctgactggactgctagagtacctgcgccggaccagcaagtacctcactgactcggcatacacagaaggctccactggaaagacgtgcctgatgaaggctgtgctgaaccttcaggatggggtcaatgcctgtatcctgccgctgctgcagattgacagggattccggcaatcctcagccccttgtcaatgcccagtgcaccgatgagttctaccgaggccacagtgcgctgcacatcgccatagagaagaggagcctgtggtgcgtgaagctgctggtagagaatggagcgaatgttcacatccgagcctgtggccgcttcttccaaaagcaccaaggaacttgtttctattttggagagctacctctttctctggcagcgtgcaccaagcagtgggatgtggtgacctacctcctggagaacccacaccagcctgccagcctggaggccaccgactccctgggcaacacagtcctgcatgctctggtaatgattgcagacaactcacctgagaacagtgcgctggtgatccacatgtatgacagccttctccaaatgggggcccgcctctgccccactgtacagcttgaggatatctgcaaccatcaaggcctcacacccctgaagttggctgccaaggaaggtaaaattgagatcttcaggcacatcctgcagcgggagttctcagggctgtaccagcccctttcccgaaagttcaccgagtggtgctacggtcctgtccgagtgtcactgtacgacctgtcctctgtggacagctgggaaaagaactcggtcctggaaatcatcgctttccattgcaagagcccgcaccggcaccgcatggtggttttagagccactgaacaagcttctgcaggagaaatgggatcggctcatcccaagattcttcttcaacttcgcctgttacttggtctacatgatcatcttcaccatagttgcctaccaccagccttccctggagcagccagccattccctcatcaaaagcgacttttggggactccatgctgctgttgggccacattctgatcctgcttgggggtatttacctcttactgggccagctgtggtacttttggcggcggcgcctgttcatctggatctcgttcatggacagttactttgaaatcctcttccttgtccaggcgctgctcacagtgctgtcccaggtgctgcgcttcgtggagactgaatggtacctccccctgttagtgtcatccctagtgctgggctggctgaacctgctttattatacacgtggctttcagcacacaggcatctacagtgtcatgatccaaaaggtcattctgcgagacctgctccgcttcctgctggtctacctagtcttccttttcggctttgctgtagccctagtaagcttgagccgggaggcccgaagtcccaaagcccctgaagatagcaacaccactgtgacggaaaagcccacgctgggtcaggaggaggagccagtcccatatgggggcattctggatgcctccctagagctgttcaagttcaccattggtatgggtgagctggctttccaggaacagctgcgctttcgtggggtggtgctgctgttgctgttggcctacgtcctcctcacctacgtcctactgctcaacatgctcattgccctcatgagtgagactgtcaacagcgttgccactgacagctggagcatctggaagttgcagaaagccatctctgtcttggagatggagaatggttactggtggtgcaggaggaaaaggcatcgcgcagggaggctgctgaaagttggcaccaaaggggatggtatacctgatgagcgctggtgcttcagggtggaggaagtaaactgggctgcatgggagaagacccttcccaccttatctgaggatccatcaggggcaggcatcactggttataaaaagaacccaacctctaaacctgggaagaacagtgcctcagaggaagaccatctgcctcttcaggtcctccagtcccactga

SEQ ID NO: 52 - protein, 756 aa, Mus musculus
  ref <308>: DATABASE ACCESSION NUMBER: Genbank AAH05415
  ref <309>: DATABASE ENTRY DATE: 2002-09-20
MTSASNPPAFRLETSDGDEEGSAEVNKGKNEPPPMESPFQGEDRNFSPQIKVNLNYRKGLGPSQQDPNRFDRDRLFSVVSRGVPEELTGLLEYLRRTSKYLTDSAYTEGSTGKTCLMKAVLNLQDGVNACILPLLQIDRDSGNPQPLVNAQCTDEFYRGHSALHIAIEKRSLWCVKLLVENGANVHIRACGRFFQKHQGTCFYFGELPLSLAACTKQWDVVTYLLENPHQPASLEATDSLGNTVLHALVMIADNSPENSALVIHMYDSLLQMGARLCPTVQLEDICNHQGLTPLKLAAKEGKIEIFRHILQREFSGLYQPLSRKFTEWCYGPVRVSLYDLSSVDSWEKNSVLEIIAFHCKSPHRHRMVVLEPLNKLLQEKWDRLIPRFFFNFACYLVYMIIFTIVAYHQPSLEQPAIPSSKATFGDSMLLLGHILILLGGIYLLLGQLWYFWRRRLFIWISFMDSYFEILFLVQALLTVLSQVLRFVETEWYLPLLVSSLVLGWLNLLYYTRGFQHTGIYSVMIQKVILRDLLRFLLVYLVFLFGFAVALVSLSREARSPKAPEDSNTTVTEKPTLGQEEEPVPYGGILDASLELFKFTIGMGELAFQEQLRFRGVVLLLLLAYVLLTYVLLLNMLIALMSETVNSVATDSWSIWKLQKAISVLEMENGYWWCRRKRHRAGRLLKVGTKGDGIPDERWCFRVEEVNWAAWEKTLPTLSEDPSGAGITGYKKNPTSKPGKNSASEEDHLPLQVLQSH

SEQ ID NO: 53 - DNA, 2616 bp, Homo sapiens
  CDS (1)...(2613)
  ref <308>: DATABASE ACCESSION NUMBER: Genbank XP_027181
  ref <309>: DATABASE ENTRY DATE: 2002-09-01
atggcggattccagcgaaggcccccgcgcggggcccggggaggtggctgagctccccggggatgagagtggcaccccaggtggggaggcttttcctctctcctccctggccaatctgtttgagggggaggatggctccctttcgccctcaccggctgatgccagtcgccctgctggcccaggcgatgggcgaccaaatctgcgcatgaagttccagggcgccttccgcaagggggtgcccaaccccatcgatctgctggagtccaccctatatgagtcctcggtggtgcctgggcccaagaaagcacccatggactcactgtttgactacggcacctatcgtcaccactccagtgacaacaagaggtggaggaagaagatcatagagaagcagccgcagagccccaaagcccctgcccctcagccgccccccatcctcaaagtcttcaaccggcctatcctctttgacatcgtgtcccggggctccactgctgacctggacgggctgctcccattcttgctgacccacaagaaacgcctaactgatgaggagtttcgagagccatctacggggaagacctgcctgcccaaggccttgctgaacctgagcaatggccgcaacgacaccatccctgtgctgctggacatcgcggagcgcaccggcaacatgagggagttcattaactcgcccttccgtgacatctactatcgaggtcagacagccctgcacatcgccattgagcgtcgctgcaaacactacgtggaacttctcgtggcccagggagctgatgtccacgcccaggcccgtgggcgcttcttccagcccaaggatgaggggggctacttctactttggggagctgcccctgtcgctggctgcctgcaccaaccagccccacattgtcaactacctgacggagaacccccacaagaaggcggacatgcggcgccaggactcgcgaggcaacacagtgctgcatgcgctggtggccattgctgacaacacccgtgagaacaccaagtttgttaccaagatgtacgacctgctgctgctcaagtgtgcccgcctcttccccgacagcaacctggaggccgtgctcaacaacgacggcctctcgcccctcatgatggctgccaagacgggcaagattgggatctttcagcacatcatccggcgggaggtgacggatgaggacacacggcacctgtcccgcaagttcaaggactgggcctatgggccagtgtattcctcgctttatgacctctcctccctggacacgtgtggggaagaggcctccgtgctggagatcctggtgtacaacagcaagattgagaaccgccacgagatgctggctgtggagcccatcaatgaactgctgcgggacaagtggcgcaagttcggggccgtctccttctacatcaacgtggtctcctacctgtgtgccatggtcatcttcactctcaccgcctactaccagccgctggagggcacaccgccgtacccttaccgcaccacggtggactacctgcggctggctggcgaggtcattacgctcttcactggggtcctgttcttcttcaccaacatcaaagacttgttcatgaagaaatgccctggagtgaattctctcttcattgatggctccttccagctgctctacttcatctactctgtcctggtgatcgtctcagcagccctctacctggcagggatcgaggcctacctggccgtgatggtctttgccctggtcctgggctggatgaatgccctttacttcacccgtgggctgaagctgacggggacctatagcatcatgatccagaagattctcttcaaggaccttttccgattcctgctcgtctacttgctcttcatgatcggctacgcttcagccctggtctccctcctgaacccgtgtgccaacatgaaggtgtgcaatgaggaccagaccaactgcacagtgcccacttacccctcgtgccgtgacagcgagaccttcagcaccttcctcctggacctgtttaagctgaccatcggcatgggcgacctggagatgctgagcagcaccaagtaccccgtggtcttcatcatcctgctggtgacctacatcatcctcacctttgtgctgctcctcaacatgctcattgccctcatgggcgagacagtgggccaggtctccaaggagagcaagcacatctggaagctgcagtgggccaccaccatcctggacattgagcgctccttccccgtattcctgaggaaggccttccgctctggggagatggtcaccgtgggcaagagctcggacggcactcctgaccgcaggtggtgcttcagggtggatgaggtgaactggtctcactggaaccagaacttgggcatcatcaacgaggacccgggcaagaatgagacctaccagtattatggcttctcgcataccgtgggccgcctccgcagggatcgctggtcctcggtggtaccccgcgtggtggaactgaacaagaactcgaacccggacgaggtggtggtgcctctggacagcatggggaacccccgctgcgatggccaccagcagggttacccccgcaagtggaggactgatgacgccccgctctag

SEQ ID NO: 54 - protein, 871 aa, Homo sapiens
  ref <308>: DATABASE ACCESSION NUMBER: Genbank XP_027181
  ref <309>: DATABASE ENTRY DATE: 2002-09-01
MADSSEGPRAGPGEVAELPGDESGTPGGEAFPLSSLANLFEGEDGSLSPSPADASRPAGPGDGRPNLRMKFQGAFRKGVPNPIDLLESTLYESSVVPGPKKAPMDSLFDYGTYRHHSSDNKRWRKKIIEKQPQSPKAPAPQPPPILKVFNRPILFDIVSRGSTADLDGLLPFLLTHKKRLTDEEFREPSTGKTCLPKALLNLSNGRNDTIPVLLDIAERTGNMREFINSPFRDIYYRGQTALHIAIERRCKHYVELLVAQGADVHAQARGRFFQPKDEGGYFYFGELPLSLAACTNQPHIVNYLTENPHKKADMRRQDSRGNTVLHALVAIADNTRENTKFVTKMYDLLLLKCARLFPDSNLEAVLNNDGLSPLMMAAKTGKIGIFQHIIRREVTDEDTRHLSRKFKDWAYGPVYSSLYDLSSLDTCGEEASVLEILVYNSKIENRHEMLAVEPINELLRDKWRKFGAVSFYINVVSYLCAMVIFTLTAYYQPLEGTPPYPYRTTVDYLRLAGEVITLFTGVLFFFTNIKDLFMKKCPGVNSLFIDGSFQLLYFIYSVLVIVSAALYLAGIEAYLAVMVFALVLGWMNALYFTRGLKLTGTYSIMIQKILFKDLFRFLLVYLLFMIGYASALVSLLNPCANMKVCNEDQTNCTVPTYPSCRDSETFSTFLLDLFKLTIGMGDLEMLSSTKYPVVFIILLVTYIILTFVLLLNMLIALMGETVGQVSKESKHIWKLQWATTILDIERSFPVFLRKAFRSGEMVTVGKSSDGTPDRRWCFRVDEVNWSHWNQNLGIINEDPGKNETYQYYGFSHTVGRLRRDRWSSVVPRVVELNKNSNPDEVVVPLDSMGNPRCDGHQQGYPRKWRTDDAPL

SEQ ID NO: 55 - DNA, 2412 bp, Homo sapiens
  CDS (1)...(2609)
  ref <308>: DATABASE ACCESSION NUMBER: Genbank AAK69487
  ref <309>: DATABASE ENTRY DATE: 2001-07-02
atgaagttccagggcgccttccgcaagggggtgcccaaccccatcgatctgctggagtccaccctatatgagtcctcggtggtgcctgggcccaagaaagcacccatggactcactgtttgactacggcacctatcgtcaccactccagtgacaacaagaggtggaggaagaagatcatagagaagcagccgcagagccccaaagcccctgcccctcagccgccccccatcctcaaagtcttcaaccggcctatcctctttgacatcgtgtcccggggctccactgctgacctggacgggctgctcccattcttgctgacccacaagaaacgcctaactgatgaggagtttcgagagccatctacggggaagacctgcctgcccaaggccttgctgaacctgagcaatggccgcaacgacaccatccctgtgctgctggacatcgcggagcgcaccggcaacatgagggagttcattaactcgcccttccgtgacatctactatcgaggtcagacagccctgcacatcgccattgagcgtcgctgcaaacactacgtggaacttctcgtggcccagggagctgatgtccacgcccaggcccgtgggcgcttcttccagcccaaggatgaggggggctacttctactttggggagctgcccctgtcgctggctgcctgcaccaaccagccccacattgtcaactacctgacggagaacccccacaagaaggcggacatgcggcgccaggactcgcgaggcaacacagtgctgcatgcgctggtggccattgctgacaacacccgtgagaacaccaagtttgttaccaagatgtacgacctgctgctgctcaagtgtgcccgcctcttccccgacagcaacctggaggccgtgctcaacaacgacggcctctcgcccctcatgatggctgccaagacgggcaagattgggatctttcagcacatcatccggcgggaggtgacggatgaggacacacggcacctgtcccgcaagttcaaggactgggcctatgggccagtgtattcctcgctttatgacctctcctccctggacacgtgtggggaagaggcctccgtgctggagatcctggtgtacaacagcaagattgagaaccgccacgagatgctggctgtggagcccatcaatgaactgctgcgggacaagtggcgcaagttcggggccgtctccttctacatcaacgtggtctcctacctgtgtgccatggtcatcttcactctcaccgcctactaccagccgctggagggcacaccgccgtacccttaccgcaccacggtggactacctgcggctggctggcgaggtcattacgctcttcactggggtcctgttcttcttcaccaacatcaaagacttgttcatgaagaaatgccctggagtgaattctctcttcattgatggctccttccagctgctctacttcatctactctgtcctggtgatcgtctcagcagccctctacctggcagggatcgaggcctacctggccgtgatggtctttgccctggtcctgggctggatgaatgccctttacttcacccgtgggctgaagctgacggggacctatagcatcatgatccagaagattctcttcaaggaccttttccgattcctgctcgtctacttgctcttcatgatcggctacgcttcagccctggtctccctcctgaacccgtgtgccaacatgaaggtgtgcaatgaggaccagaccaactgcacagtgcccacttacccctcgtgccgtgacagcgagaccttcagcaccttcctcctggacctgtttaagctgaccatcggcatgggcgacctggagatgctgagcagcaccaagtaccccgtggtcttcatcatcctgctggtgacctacatcatcctcacctttgtgctgctcctcaacatgctcattgccctcatgggcgagacagtgggccaggtctccaaggagagcaagcacatctggaagctgcagtgggccaccaccatcctggacattgagcgctccttccccgtattcctgaggaaggccttccgctctggggagatggtcaccgtgggcaagagctcggacggcactcctgaccgcaggtggtgcttcagggtggatgaggtgaactggtctcactggaaccagaacttgggcatcatcaacgaggacccgggcaagaatgagacctaccagtattatggcttctcgcataccgtgggccgcctccgcagggatcgctggtcctcggtggtaccccgcgtggtggaactgaacaagaactcgaacccggacgaggtggtggtgcctctggacagcatggggaacccccgctgcgatggccaccagcagggttacccccgcaagtggaggactgatgacgccccgctctag

SEQ ID NO: 56 - protein, 803 aa, Homo sapiens
  ref <308>: DATABASE ACCESSION NUMBER: Genbank AAK69487
  ref <309>: DATABASE ENTRY DATE: 2001-07-02
MKFQGAFRKGVPNPIDLLESTLYESSVVPGPKKAPMDSLFDYGTYRHHSSDNKRWRKKIIEKQPQSPKAPAPQPPPILKVFNRPILFDIVSRGSTADLDGLLPFLLTHKKRLTDEEFREPSTGKTCLPKALLNLSNGRNDTIPVLLDIAERTGNMREFINSPFRDIYYRGQTALHIAIERRCKHYVELLVAQGADVHAQARGRFFQPKDEGGYFYFGELPLSLAACTNQPHIVNYLTENPHKKADMRRQDSRGNTVLHALVAIADNTRENTKFVTKMYDLLLLKCARLFPDSNLEAVLNNDGLSPLMMAAKTGKIGIFQHIIRREVTDEDTRHLSRKFKDWAYGPVYSSLYDLSSLDTCGEEASVLEILVYNSKIENRHEMLAVEPINELLRDKWRKFGAVSFYINVVSYLCAMVIFTLTAYYQPLEGTPPYPYRTTVDYLRLAGEVITLFTGVLFFFTNIKDLFMKKCPGVNSLFIDGSFQLLYFIYSVLVIVSAALYLAGIEAYLAVMVFALVLGWMNALYFTRGLKLTGTYSIMIQKILFKDLFRFLLVYLLFMIGYASALVSLLNPCANMKVCNEDQTNCTVPTYPSCRDSETFSTFLLDLFKLTIGMGDLEMLSSTKYPVVFIILLVTYIILTFVLLLNMLIALMGETVGQVSKESKHIWKLQWATTILDIERSFPVFLRKAFRSGEMVTVGKSSDGTPDRRWCFRVDEVNWSHWNQNLGIINEDPGKNETYQYYGFSHTVGRLRRDRWSSVVPRVVELNKNSNPDEVVVPLDSMGNPRCDGHQQGYPRKWRTDDAPL

SEQ ID NO: 57 - DNA, 2616 bp, Homo sapiens
  CDS (1)...(2613)
  ref <308>: DATABASE ACCESSION NUMBER: Genbank BAB69040
  ref <309>: DATABASE ENTRY DATE: 2001-10-02
atggcggattccagcgaaggcccccgcgcggggcccggggaggtggctgagctccccggggatgagagtggcaccccaggtggggaggcttttcctctctcctccctggccaatctgtttgagggggaggatggctccctttcgccctcaccggctgatgccagtcgccctgctggcccaggcgatgggcgaccaaatctgcgcatgaagttccagggcgccttccgcaagggggtgcccaaccccatcgatctgctggagtccaccctatatgagtcctcggtggtgcctgggcccaagaaagcacccatggactcactgtttgactacggcacctatcgtcaccactccagtgacaacaagaggtggaggaagaagatcatagagaagcagccgcagagccccaaagcccctgcccctcagccgccccccatcctcaaagtcttcaaccggcctatcctctttgacatcgtgtcccggggctccactgctgacctggacgggctgctcccattcttgctgacccacaagaaacgcctaactgatgaggagtttcgagagccatctacggggaagacctgcctgcccaaggccttgctgaacctgagcaatggccgcaacgacaccatccctgtgctgctggacatcgcggagcgcaccggcaacatgagggagttcattaactcgcccttccgtgacatctactatcgaggtcagacagccctgcacatcgccattgagcgtcgctgcaaacactacgtggaacttctcgtggcccagggagctgatgtccacgcccaggcccgtgggcgcttcttccagcccaaggatgaggggggctacttctactttggggagctgcccctgtcgctggctgcctgcaccaaccagccccacattgtcaactacctgacggagaacccccacaagaaggcggacatgcggcgccaggactcgcgaggcaacacagtgctgcatgcgctggtggccattgctgacaacacccgtgagaacaccaagtttgttaccaagatgtacgacctgctgctgctcaagtgtgcccgcctcttccccgacagcaacctggaggccgtgctcaacaacgacggcctctcgcccctcatgatggctgccaagacgggcaagattgggatctttcagcacatcatccggcgggaggtgacggatgaggacacacggcacctgtcccgcaagttcaaggactgggcctatgggccagtgtattcctcgctttatgacctctcctccctggacacgtgtggggaagaggcctccgtgctggagatcctggtgtacaacagcaagattgagaaccgccacgagatgctggctgtggagcccatcaatgaactgctgcgggacaagtggcgcaagttcggggccgtctccttctacatcaacgtggtctcctacctgtgtgccatggtcatcttcactctcaccgcctactaccagccgctggagggcacaccgccgtacccttaccgcaccacggtggactacctgcggctggctggcgaggtcattacgctcttcactggggtcctgttcttcttcaccaacatcaaagacttgttcatgaagaaatgccctggagtgaattctctcttcattgatggctccttccagctgctctacttcatctactctgtcctggtgatcgtctcagcagccctctacctggcagggatcgaggcctacctggccgtgatggtctttgccctggtcctgggctggatgaatgccctttacttcacccgtgggctgaagctgacggggacctatagcatcatgatccagaagattctcttcaaggaccttttccgattcctgctcgtctacttgctcttcatgatcggctacgcttcagccctggtctccctcctgaacccgtgtgccaacatgaaggtgtgcaatgaggaccagaccaactgcacagtgcccacttacccctcgtgccgtgacagcgagaccttcagcaccttcctcctggacctgtttaagctgaccatcggcatgggcgacctggagatgctgagcagcaccaagtaccccgtggtcttcatcatcctgctggtgacctacatcatcctcacctttgtgctgctcctcaacatgctcattgccctcatgggcgagacagtgggccaggtctccaaggagagcaagcacatctggaagctgcagtgggccaccaccatcctggacattgagcgctccttccccgtattcctgaggaaggccttccgctctggggagatggtcaccgtgggcaagagctcggacggcactcctgaccgcaggtggtgcttcagggtggatgaggtgaactggtctcactggaaccagaacttgggcatcatcaacgaggacccgggcaagaatgagacctaccagtattatggcttctcgcataccgtgggccgcctccgcaggactcgctggtcctcggtggtaccccgcgtggtggaactgaacaagaactcgaacccggacgaggtggtggtgcctctggacagcatggggaacccccgctgcgatggccaccagcagggttacccccgcaagtggaggactgatgacgccccgctctag

SEQ ID NO: 58 - protein, 871 aa, Homo sapiens [sequence omitted]

SEQ ID NO: 59 - DNA, 2616 bp, Homo sapiens
  CDS (1)...(2613)
  ref <308>: DATABASE ACCESSION NUMBER: Genbank AAG28029
  ref <309>: DATABASE ENTRY DATE: 2000-10-31
atggcggattccagcgaaggcccccgcgcggggcccggggaggtggctgagctccccggggatgagagtggcaccccaggtggggaggcttttcctctctcctccctggccaatctgtttgagggggaggatggctccctttcgccctcaccggctgatgccagtcgccctgctggcccaggcgatgggcgaccaaatctgcgcatgaagttccagggcgccttccgcaagggggtgcccaaccccatcgatctgctggagtccaccctatatgagtcctcggtggtgcctgggcccaagaaagcacccatggactcactgtttgactacggcacctatcgtcaccactccagtgacaacaagaggtggaggaagaagatcatagagaagcagccgcagagccccaaagctcccgcccctcagccgccccccatcctcaaagtcttcaaccggcccatcctctttgacatcgtgtcccggggctccactgctgacctggacgggctgctcccattcttgctgacccacaagaaacgcctaactgatgaggagtttcgggaaccatctacggggaagacctgcctgcccaaggccttgctgaacctgagcaatggccgcaacgacaccatccctgtgctgctggacatcgcggagcgcaccggcaacatgagggagttcattaactcgcccttccgtgacatctactatcgagggcagacagccctgcacatcgccattgagcgtcgctgcaaacactacgtggaacttctcgtggcccagggagctgatgtccacgcccaggcccgtgggcgcttcttccagcccaaggatgaggggggctacttctactttggggagctgcccctgtcgctggctgcctgcaccaaccagccccacattgtcaactacctgacggagaacccccacaagaaggcggacatgcggcgccaggactcgcgaggcaacacagtgctgcatgcgctggtggccattgctgacaacacccgtgagaacaccaagtttgttaccaagatgtacgacctgctgctgctcaagtgtgcccgcctcttccccgacagcaacctggaggccgtgctcaacaacgacggcctctcgcccctcatgatggctgccaagacgggcaagattggggtctttcagcacatcatccggcgggaggtgacggatgaggacacacggcacctgtcccgcaagttcaaggactgggcctatgggccagtgtattcctcgctttatgacctctcctccctggacacgtgtggggaagaggcctccgtgctggagatcctggtgtacaacagcaagattgagaaccgccacgagatgctggctgtggagcccatcaatgaactgctgcgggacaagtggcgcaagttcggggccgtctccttctacatcaacgtggtctcctacctgtgtgccatggtcatcttcactctcaccgcctactaccagccgctggagggcacaccgccgtacccttaccgcaccacggtggactacctgcggctggctggcgaggtcattacgctcttcactggggtcctgttcttcttcaccaacatcaaagacttgttcatgaagaaatgccctggagtgaattctctcttcattgatggctccttccagctgctctacttcatctactctgtcctggtgatcgtctcagcagccctctacctggcagggatcgaggcctacctggccgtgatggtctttgccctggtcctgggctggatgaatgccctttacttcacccgtgggctgaagctgacggggacctatagcatcatgatccagaagattctcttcaaggaccttttccgattcctgctcgtctacttgctcttcatgatcggctacgcctcagccctggtctccctcctgaacccgtgtgccaacatgaaggtgtgcaatgaggaccagaccaactgcacagtgcccacttacccctcgtgccgtgacagcgagaccttcagcaccttcctcctggacctgtttaagctgaccatcggcatgggcgacctggagatgctgagcagcaccaagtaccccgtggtcttcatcatcctgctggtgacctacatcatcctcacctttgtgctgctcctcaacatgctcattgccctcatgggcgagacagtgggccaggtctccaaggagagcaagcacatctggaagctgcagtgggccaccaccatcctggacattgagcgctccttccccgtattcctgaggaaggccttccgctctggggagatggtcaccgtgggcaagagctcggacggcactcctgaccgcaggtggtgcttcagggtgaatgaggtgaactggtctcactggaaccagaacttgggcatcatcaacgaggacccgggcaagaatgagacctaccagtattatggcttctcgcataccgtgggccgcctccgcagggatcgctggtcctcggtggtaccccgcgtggtggaactgaacaagaactcgaacccggacgaggtggtggtgcctctggacagcatggggaacccccgctgcgatggccaccagcagggttacccccgcaagtggaggactgatgacgccccgctctag

SEQ ID NO: 60 - protein, 871 aa, Homo sapiens
  ref <308>: DATABASE ACCESSION NUMBER: Genbank AAG28029
  ref <309>: DATABASE ENTRY DATE: 2000-10-31
MADSSEGPRAGPGEVAELPGDESGTPGGEAFPLSSLANLFEGEDGSLSPSPADASRPAGPGDGRPNLRMKFQGAFRKGVPNPIDLLESTLYESSVVPGPKKAPMDSLFDYGTYRHHSSDNKRWRKKIIEKQPQSPKAPAPQPPPILKVFNRPILFDIVSRGSTADLDGLLPFLLTHKKRLTDEEFREPSTGKTCLPKALLNLSNGRNDTIPVLLDIAERTGNMREFINSPFRDIYYRGQTALHIAIERRCKHYVELLVAQGADVHAQARGRFFQPKDEGGYFYFGELPLSLAACTNQPHIVNYLTENPHKKADMRRQDSRGNTVLHALVAIADNTRENTKFVTKMYDLLLLKCARLFPDSNLEAVLNNDGLSPLMMAAKTGKIGVFQHIIRREVTDEDTRHLSRKFKDWAYGPVYSSLYDLSSLDTCGEEASVLEILVYNSKIENRHEMLAVEPINELLRDKWRKFGAVSFYINVVSYLCAMVIFTLTAYYQPLEGTPPYPYRTTVDYLRLAGEVITLFTGVLFFFTNIKDLFMKKCPGVNSLFIDGSFQLLYFIYSVLVIVSAALYLAGIEAYLAVMVFALVLGWMNALYFTRGLKLTGTYSIMIQKILFKDLFRFLLVYLLFMIGYASALVSLLNPCANMKVCNEDQTNCTVPTYPSCRDSETFSTFLLDLFKLTIGMGDLEMLSSTKYPVVFIILLVTYIILTFVLLLNMLIALMGETVGQVSKESKHIWKLQWATTILDIERSFPVFLRKAFRSGEMVTVGKSSDGTPDRRWCFRVNEVNWSHWNQNLGIINEDPGKNETYQYYGFSHTVGRLRRDRWSSVVPRVVELNKNSNPDEVVVPLDSMGNPRCDGHQQGYPRKWRTDDAPL

SEQ ID NO: 61 - DNA, 2412 bp, Mus musculus
  CDS (1)...(2409)
  ref <308>: DATABASE ACCESSION NUMBER: Genbank AAK69486
  ref <309>: DATABASE ENTRY DATE: 2001-07-02
atgaagttccagggcgctttccgcaagggggttcccaaccccattgacctgttggagtccacccggtacgagtcctcagtagtgcctgggcccaagaaagcgcccatggattccttgttcgactacggcacttaccgtcaccaccccagtgacaacaagagatggaggagaaaggtcgtggagaagcagccacagagccccaaagctcctgcaccccagccaccccccatcctcaaagtcttcaatcggcccatcctctttgacattgtgtcccggggctccactgcggacctagatggactgctctccttcttgttgacccacaagaagcgcctgactgatgaggagttccgggagccgtccacggggaagacctgcctgcccaaggcgctgctgaacctaagcaacgggcgcaacgacaccatcccggtgttgctggacattgcggagcgcaccggcaacatgcgtgaattcatcaactcgcccttcagagacatctactaccgaggccagacatccctgcacattgccatcgaacggcgctgcaagcactacgtggagctgctggtggcccagggagccgacgtgcacgcccaggcccgcggccgcttcttccagcccaaggatgagggaggctacttctactttggggagctgcccttgtccctggcagcctgcaccaaccagccgcacatcgtcaactacctgacagagaaccctcacaagaaagctgacatgaggcgacaggactcgagggggaacacggtgctgcacgcgctggtggccatcgccgacaacacccgagagaacaccaagtttgtcaccaagatgtacgacctgctgcttctcaagtgttcacgcctcttccccgacagcaacctggagacagttctcaacaatgatggcctttcgcctctcatgatggctgccaagacaggcaagatcggggtctttcagcacatcatccgacgtgaggtgacagatgaggacacccggcatctgtctcgcaagttcaaggactgggcctatgggcctgtgtattcttctctctacgacctctcctccctggacacatgcggggaggaggtgtccgtgctggagatcctggtgtacaacagcaagatcgagaaccgccatgagatgctggctgtagagcccattaacgaactgttgagagacaagtggcgtaagtttggggctgtgtccttctacatcaacgtggtctcctatctgtgtgccatggtcatcttcaccctcaccgcctactatcagccactggagggcacgccaccctacccttaccggaccacagtggactacctgaggctggctggcgaggtcatcacgctcttcacaggagtcctgttcttctttaccagtatcaaagacttgttcacgaagaaatgccctggagtgaattctctcttcgtcgatggctccttccagttactctacttcatctactctgtgctggtggttgtctctgcggcgctctacctggctgggatcgaggcctacctggctgtgatggtctttgccctggtcctgggctggatgaatgcgctgtacttcacgcgcgggttgaagctgacggggacctacagcatcatgattcagaagatcctcttcaaagacctcttccgcttcctgcttgtgtacctgctcttcatgatcggctatgcctcagccctggtcaccctcctgaatccgtgcaccaacatgaaggtctgtgacgaggaccagagcaactgcacggtgcccacgtatcctgcgtgccgcgacagcgagaccttcagcgccttcctcctggacctcttcaagctcaccatcggcatgggagacctggagatgctgagcagcgccaagtaccccgtggtcttcatcctcctgctggtcacctacatcatcctcaccttcgtgctcctgttgaacatgcttatcgccctcatgggtgagaccgtgggccaggtgtccaaggagagcaagcacatctggaagttgcagtgggccaccaccatcctggacatcgagcgttccttccctgtgttcctgaggaaggccttccgctccggagagatggtgactgtgggcaagagctcagatggcactccggaccgcaggtggtgcttcagggtggacgaggtgaactggtctcactggaaccagaacttgggcatcattaacgaggaccctggcaagagtgaaatctaccagtactatggcttctcccacaccgtggggcgccttcgtagggatcgttggtcctcggtggtgccccgcgtagtggagctgaacaagaactcaagcgcagatgaagtggtggtacccctggataacctagggaaccccaactgtgacggccaccagcagggctacgctcccaagtggaggacggacgatgccccactgtag

SEQ ID NO: 62 - protein, 803 aa, Mus musculus
  ref <308>: DATABASE ACCESSION NUMBER: Genbank AAK69486
  ref <309>: DATABASE ENTRY DATE: 2001-07-02
MKFQGAFRKGVPNPIDLLESTRYESSVVPGPKKAPMDSLFDYGTYRHHPSDNKRWRRKVVEKQPQSPKAPAPQPPPILKVFNRPILFDIVSRGSTADLDGLLSFLLTHKKRLTDEEFREPSTGKTCLPKALLNLSNGRNDTIPVLLDIAERTGNMREFINSPFRDIYYRGQTSLHIAIERRCKHYVELLVAQGADVHAQARGRFFQPKDEGGYFYFGELPLSLAACTNQPHIVNYLTENPHKKADMRRQDSRGNTVLHALVAIADNTRENTKFVTKMYDLLLLKCSRLFPDSNLETVLNNDGLSPLMMAAKTGKIGVFQHIIRREVTDEDTRHLSRKFKDWAYGPVYSSLYDLSSLDTCGEEVSVLEILVYNSKIENRHEMLAVEPINELLRDKWRKFGAVSFYINVVSYLCAMVIFTLTAYYQPLEGTPPYPYRTTVDYLRLAGEVITLFTGVLFFFTSIKDLFTKKCPGVNSLFVDGSFQLLYFIYSVLVVVSAALYLAGIEAYLAVMVFALVLGWMNALYFTRGLKLTGTYSIMIQKILFKDLFRFLLVYLLFMIGYASALVTLLNPCTNMKVCDEDQSNCTVPTYPACRDSETFSAFLLDLFKLTIGMGDLEMLSSAKYPVVFILLLVTYIILTFVLLLNMLIALMGETVGQVSKESKHIWKLQWATTILDIERSFPVFLRKAFRSGEMVTVGKSSDGTPDRRWCFRVDEVNWSHWNQNLGIINEDPGKSEIYQYYGFSHTVGRLRRDRWSSVVPRVVELNKNSSADEVVVPLDNLGNPNCDGHQQGYAPKWRTDDAPL

SEQ ID NO: 63 - DNA, 2622 bp, Mus musculus
  CDS (1)...(2619)
  ref <308>: DATABASE ACCESSION NUMBER: Genbank AAG28028
  ref <309>: DATABASE ENTRY DATE: 2000-10-31
atggcagatcctggtgatggtccccgtgcagcgcctggggaggtggctgagccccctggagatgagagtggtacctctggtggggaggccttccccctctcttccctggccaatctgtttgaaggggaagaaagctcctacttctcttatccccggtggactgctagccgccctgctggccctggcgatggacgtccaaacctgcgtatgaagttcggcaggagcgctttccgcaagggggttcccaaccccattgacctgttggagtccaccctgtacgagtcctcagtagtgcctgggcccaagaaagcgcccatggattccttgttcgactacggcacttaccgtcaccaccccagtgacaacaagagatggaggagaaaggtcgtggagaagcagccacagagccccaaagctcctgcaccccagccaccccccatcctcaaagtcttcaatcggcccatcctctttgacattgtgtcccggggctccactgcggacctagatggactgctctccttcttgttgacccacaagaagcgcctgactgatgaggagttccgggagccgtccacggggaagacctgcctgcccaaggcgctgctgaacttaagcaacgggcgcaacgacaccatcccggtgttgctggacattgcggagcgcaccggcaacatgcgtgaattcatcaactcgcccttcagagacatctactaccgaggccagacatccctgcacattgccatcgaacggcgctgcaagcactacgtggagctgctggtggcccagggagccgacgtgcacgcccaggcccgcggccgcttcttccagcccaaggatgagggaggctacttctactttggggagctgcccttgtccctggcagcctgcaccaaccagccgcacatcgtcaactacctgacagagaaccctcacaagaaagctgacatgaggcgacaggactcgagggggaacacggtgctgcacgcgctggtggccatcgccgacaacacccgagagaacaccaagtttgtcaccaagatgtacgacctgctgcttctcaagtgttcacgcctcttccccgacagcaacctggagacagttctcaacaatgatggcctttcgcctctcatgatggctgccaagacaggcaagatcggggtctttcagcacatcatccgacgtgaggtgacagatgaggacacccggcatctgtctcgcaagttcaaggactgggcctatgggcctgtgtattcttctctctacgacctctcctccctggacacatgcggggaggaggtgtccgtgctggagatcctggtgtacaacagcaagatcgagaaccgccatgagatgctggctgtagagcccattaacgaactgttgagagacaagtggcgtaagtttggggctgtgtccttctacatcaacgtggtcccctatctgtgtgccatggtcatcttcaccctcaccgcctactatcagccactggagggcacgccaccctacccttaccggaccacagtggactacctgaggctggctggcgaggtcatcacgctcttcacaggagtcctgttcttctttaccagtatcaaagacttgttcacgaagaaatgccctggagtgaattctctcttcgtcgatggctccttccagttactctacttcatctactctgtgctggtggttgtctctgcggcgctctacctggctgggatcgaggcctacctggctgtgatggtctttgccctggtcctgggctggatgaatgcgctgtacttcacgcgcgggttgaagctgacggggacctacagcatcatgattcagaagatcctcttcaaagacctcttccgctttctgcttgtgtacctgctcttcatgatcggctatgcctcagccctggtcaccctcctgaatccgtgcaccaacatgaaggtctgtgacgaggaccagagcaactgcacggtgcccacgtatcctgcgtgccgcgacagcgagaccttcagcgccttcctcctggacctcttcaagctcaccatcggcatgggagacctggagatgctgagcagcgccaagtaccccgtggtcttcatcctcctgctggtcacctacatcatcctcaccttcgtgctcctgttgaacatgcttatcgccctcatgggtgagaccgtgggccaggtgtccaaggagagcaagcacatctggaagttgcagtgggccaccaccatcctggacatcgagcgttccttccctgtgttcctgaggaaggccttccgctccggagagatggtgactgtgggcaagagctcagatggcactccggaccgcaggtggtgcttcagggtggacgaggtgaactggtctcactggaaccagaacttgggcatcattaacgaggaccctggcaagagtgaaatctaccagtactatggcttctcccacaccgtggggcgccttcgtagggatcgttggtcctcggtggtgccccgcgtagtggagctgaacaagaactcaagcgcagatgaagtggtggtacccctggataacctagggaaccccaactgtgacggccaccagcagggctacgctcccaagtggaggacggacgatgccccactgtag

SEQ ID NO: 64 - protein, 873 aa, Mus musculus
  ref <308>: DATABASE ACCESSION NUMBER: Genbank AAG28028
  ref <309>: DATABASE ENTRY DATE: 2000-10-31
MADPGDGPRAAPGEVAEPPGDESGTSGGEAFPLSSLANLFEGEESSYFSYPRWTASRPAGPGDGRPNLRMKFGRSAFRKGVPNPIDLLESTLYESSVVPGPKKAPMDSLFDYGTYRHHPSDNKRWRRKVVEKQPQSPKAPAPQPPPILKVFNRPILFDIVSRGSTADLDGLLSFLLTHKKRLTDEEFREPSTGKTCLPKALLNLSNGRNDTIPVLLDIAERTGNMREFINSPFRDIYYRGQTSLHIAIERRCKHYVELLVAQGADVHAQARGRFFQPKDEGGYFYFGELPLSLAACTNQPHIVNYLTENPHKKADMRRQDSRGNTVLHALVAIADNTRENTKFVTKMYDLLLLKCSRLFPDSNLETVLNNDGLSPLMMAAKTGKIGVFQHIIRREVTDEDTRHLSRKFKDWAYGPVYSSLYDLSSLDTCGEEVSVLEILVYNSKIENRHEMLAVEPINELLRDKWRKFGAVSFYINVVPYLCAMVIFTLTAYYQPLEGTPPYPYRTTVDYLRLAGEVITLFTGVLFFFTSIKDLFTKKCPGVNSLFVDGSFQLLYFIYSVLVVVSAALYLAGIEAYLAVMVFALVLGWMNALYFTRGLKLTGTYSIMIQKILFKDLFRFLLVYLLFMIGYASALVTLLNPCTNMKVCDEDQSNCTVPTYPACRDSETFSAFLLDLFKLTIGMGDLEMLSSAKYPVVFILLLVTYIILTFVLLLNMLIALMGETVGQVSKESKHIWKLQWATTILDIERSFPVFLRKAFRSGEMVTVGKSSDGTPDRRWCFRVDEVNWSHWNQNLGIINEDPGKSEIYQYYGFSHTVGRLRRDRWSSVVPRVVELNKNSSADEVVVPLDNLGNPNCDGHQQGYAPKWRTDDAPL

SEQ ID NO: 65 - DNA, 2616 bp, Rattus norvegicus
  CDS (1)...(2613)
  ref <308>: DATABASE ACCESSION NUMBER: Genbank AAG28027
  ref <309>: DATABASE ENTRY DATE: 2000-10-31
atggcagatcctggtgatggcccccgtgcagcgcctggggatgtggctgagccccctggagacgagagtggcacttctggtggggaggccttccccctctcttccctggccaacctgtttgagggagaggaaggctcctcttctctttcaccagtggatgctagccgccctgctggccccggggatggacgtccaaacctgcgtatgaagttccagggcgctttccgcaagggggttcccaaccccattgacctgctggagtccaccctgtatgagtcctcagtagtgcctgggcccaagaaagcgcccatggattcgttgttcgactatggcacttaccggcaccaccccagtgacaacaagagatggaggaggaaggtcgtagagaagcagccacagagccccaaagctcccgccccccagccaccccccatcctcaaagtcttcaaccggcccatcctctttgacatcgtgtcccggggctccactgccgacctggacggactgctctcctacttgctgacccacaagaagcgcctgactgatgaggagttccgggaaccatccacagggaagacctgcctgcccaaggcacttctgaacttaagcaatggccgaaacgacaccatcccagtgttgctggacattgcggaacgcacgggcaacatgcgggagttcatcaactcgcccttcagagacatctactaccgagggcagacggcactgcacatcgccattgaacggcgctgcaagcattacgtggagctcctggtggcccagggagccgatgtgcacgcgcaggcccgagggcggttcttccagcccaaggatgagggtggctacttctactttggggagctgcccttgtccttggcagcctgcaccaaccagccgcacatcgtcaactacctgacagagaaccctcacaagaaagccgatatgaggcgacaggactccagaggcaacacggtgctccacgcgctggtggccatcgctgacaacacccgagagaacaccaagtttgtcaccaagatgtatgacctgttgcttctcaagtgctcccgcctcttcccagacagcaacctggagactgtgcttaacaatgacggtctttcgcccctcatgatggctgccaagactggcaagatcggggtctttcagcacatcatccgacgggaggtgacagatgaggacacacggcacctgtctcgcaagttcaaggactgggcctacgggcctgtgtattcttctctctacgacctctcctccctggatacgtgcggggaggaagtgtccgtgctggagatcctggtttacaacagcaagatcgagaaccgccatgagatgctggctgtggagcccattaacgaactgctgagggacaagtggcgtaagttcggggccgtgtccttctacatcaacgttgtctcctatctgtgtgccatggtcatcttcaccctcacagcctactatcagccactggagggcacgccaccctacccttaccgtaccacggtggactacctgaggctggctggtgaggtcatcacgctcctcacaggagtcctgttcttctttaccagtatcaaagacttgttcatgaagaaatgccctggagtgaattctctcttcgtcgatggctccttccagttgctctacttcatctactcagtgctggtggttgtgtctgcggcgctctacctggcagggatcgaggcctatctggctgtgatggtctttgccctggtcctgggctggatgaatgccctttacttcacccgtgggctgaagctgacagggacctacagcatcatgattcagaagatcctcttcaaagatctcttccgctttctgctggtctacctgctttttatgattggctatgcctcagctctggtcaccctcctgaatccgtgcaccaacatgaaggtctgtaacgaggaccagagcaactgcacggtgccctcataccccgcgtgccgggacagcgagaccttcagcgccttcctactggacctcttcaagctcaccatcggcatgggcgacctggagatgctgagcagcgctaagtaccccgtggtcttcattctcctgctggttacctacatcatcctcaccttcgtgctcctgctgaacatgctcatcgccctcatgggtgagaccgtgggccaggtgtccaaggagagcaagcacatctggaagctgcagtgggccaccaccatcctggacatcgagcgctccttccctgtgttcctgaggaaggccttccgctccggagagatggtgacagtgggcaagagctcggatggcactccagaccgcaggtggtgcttcagggtggacgaggtgaactggtctcactggaaccagaacctgggcatcattaacgaggaccccggcaagagcgagatctaccagtactatggcttctcccataccatggggcgcctccgcagggatcgctggtcctcagtggtgccccgcgtggtggagctgaacaagaactcaggcacagatgaagtggtggtccccctggataacctagggaaccccaactgtgacggccaccagcaaggttatgctcccaagtggagggcggaggacgcaccactgtag

SEQ ID NO: 66 - protein, 871 aa, Rattus norvegicus
  ref <308>: DATABASE ACCESSION NUMBER: Genbank AAG28027
  ref <309>: DATABASE ENTRY DATE: 2000-10-31
MADPGDGPRAAPGDVAEPPGDESGTSGGEAFPLSSLANLFEGEEGSSSLSPVDASRPAGPGDGRPNLRMKFQGAFRKGVPNPIDLLESTLYESSVVPGPKKAPMDSLFDYGTYRHHPSDNKRWRRKVVEKQPQSPKAPAPQPPPILKVFNRPILFDIVSRGSTADLDGLLSYLLTHKKRLTDEEFREPSTGKTCLPKALLNLSNGRNDTIPVLLDIAERTGNMREFINSPFRDIYYRGQTALHIAIERRCKHYVELLVAQGADVHAQARGRFFQPKDEGGYFYFGELPLSLAACTNQPHIVNYLTENPHKKADMRRQDSRGNTVLHALVAIADNTRENTKFVTKMYDLLLLKCSRLFPDSNLETVLNNDGLSPLMMAAKTGKIGVFQHIIRREVTDEDTRHLSRKFKDWAYGPVYSSLYDLSSLDTCGEEVSVLEILVYNSKIENRHEMLAVEPINELLRDKWRKFGAVSFYINVVSYLCAMVIFTLTAYYQPLEGTPPYPYRTTVDYLRLAGEVITLLTGVLFFFTSIKDLFMKKCPGVNSLFVDGSFQLLYFIYSVLVVVSAALYLAGIEAYLAVMVFALVLGWMNALYFTRGLKLTGTYSIMIQKILFKDLFRFLLVYLLFMIGYASALVTLLNPCTNMKVCNEDQSNCTVPSYPACRDSETFSAFLLDLFKLTIGMGDLEMLSSAKYPVVFILLLVTYIILTFVLLLNMLIALMGETVGQVSKESKHIWKLQWATTILDIERSFPVFLRKAFRSGEMVTVGKSSDGTPDRRWCFRVDEVNWSHWNQNLGIINEDPGKSEIYQYYGFSHTMGRLRRDRWSSVVPRVVELNKNSGTDEVVVPLDNLGNPNCDGHQQGYAPKWRAEDAPL

SEQ ID NO: 67 - DNA, 2295 bp, Homo sapiens
  CDS (1)...(2292)
  ref <308>: DATABASE ACCESSION NUMBER: Genbank AAD26363
  ref <309>: DATABASE ENTRY DATE: 1999-04-07
atgacctcaccctccagctctccagttttcaggttggagacattagatggaggccaagaagatggctctgaggcggacagaggaaagctggattttgggagcgggctgcctcccatggagtcacagttccagggcgaggaccggaaattcgcccctcagataagagtcaacctcaactaccgaaagggaacaggtgccagtcagccggatccaaaccgatttgaccgagatcggctcttcaatgcggtctcccggggtgtccccgaggatctggctggacttccagagtacctgagcaagaccagcaagtacctcaccgactcggaatacacagagggctccacaggtaagacgtgcctgatgaaggctgtgctgaaccttaaggacggagtcaatgcctgcattctgccactgctgcagatcgacagggactctggcaatcctcagcccctggtaaatgcccagtgcacagatgactattaccgaggccacagcgctctgcacatcgccattgagaagaggagtctgcagtgtgtgaagctcctggtggagaatggggccaatgtgcatgcccgggcctgcggccgcttcttccagaagggccaagggacttgcttttatttcggtgagctacccctctctttggccgcttgcaccaagcagtgggatgtggtaagctacctcctggagaacccacaccagcccgccagcctgcaggccactgactcccagggcaacacagtcctgcatgccctagtgatgatctcggacaactcagctgagaacattgcactggtgaccagcatgtatgatgggctcctccaagctggggcccgcctctgccctaccgtgcagcttgaggacatccgcaacctgcaggatctcacgcctctgaagctggccgccaaggagggcaagatcgagattttcaggcacatcctgcagcgggagttttcaggactgagccacctttcccgaaagttcaccgagtggtgctatgggcctgtccgggtgtcgctgtatgacctggcttctgtggacagctgtgaggagaactcagtgctggagatcattgcctttcattgcaagagcccgcaccgacaccgaatggtcgttttggagcccctgaacaaactgctgcaggcgaaatgggatctgctcatccccaagttcttcttaaacttcctgtgtaatctgatctacatgttcatcttcaccgctgttgcctaccatcagcctaccctgaagaagcaggccgcccctcacctgaaagcggaggttggaaactccatgctgctgacgggccacatccttatcctgctaggggggatctacctcctcgtgggccagctgtggtacttctggcggcgccacgtgttcatctggatctcgttcatagacagctactttgaaatcctcttcctgttccaggccctgctcacagtggtgtcccaggtgctgtgtttcctggccatcgagtggtacctgcccctgcttgtgtctgcgctggtgctgggctggctgaacctgctttactatacacgtggcttccagcacacaggcatctacagtgtcatgatccagaaggtcatcctgcgggacctgctgcgcttccttctgatctacttagtcttccttttcggcttcgctgtagccctggtgagcctgagccaggaggcttggcgccccgaagctcctacaggccccaatgccacagagtcagtgcagcccatggagggacaggaggacgagggcaacggggcccagtacaggggtatcctggaagcctccttggagctcttcaaattcaccatcggcatgggcgagctggccttccaggagcagctgcacttccgcggcatggtgctgctgctgctgctggcctacgtgctgctcacctacatcctgctgctcaacatgctcatcgccctcatgagcgagaccgtcaacagtgtcgccactgacagctggagcatctggaagctgcagaaagccatctctgtcctggagatggagaatggctattggtggtgcaggaagaagcagcgggcaggtgtgatgctgaccgttggcactaagccagatggcagccccgatgagcgctggtgcttcagggtggaggaggtgaactgggcttcatgggagcagacgctgcctacgctgtgtgaggacccgtcaggggcaggtgtccctcgaactctcgagaaccctgtcctggcttcccctcccaaggaggatgaggatggtgcctctgaggaaaactatgtgcccgtccagctcctccagtccaactga

SEQ ID NO: 68 - protein, 764 aa, Homo sapiens
  ref <308>: DATABASE ACCESSION NUMBER: Genbank AAD26363
  ref <309>: DATABASE ENTRY DATE: 1999-04-07
MTSPSSSPVFRLETLDGGQEDGSEADRGKLDFGSGLPPMESQFQGEDRKFAPQIRVNLNYRKGTGASQPDPNRFDRDRLFNAVSRGVPEDLAGLPEYLSKTSKYLTDSEYTEGSTGKTCLMKAVLNLKDGVNACILPLLQIDRDSGNPQPLVNAQCTDDYYRGHSALHIAIEKRSLQCVKLLVENGANVHARACGRFFQKGQGTCFYFGELPLSLAACTKQWDVVSYLLENPHQPASLQATDSQGNTVLHALVMISDNSAENIALVTSMYDGLLQAGARLCPTVQLEDIRNLQDLTPLKLAAKEGKIEIFRHILQREFSGLSHLSRKFTEWCYGPVRVSLYDLASVDSCEENSVLEIIAFHCKSPHRHRMVVLEPLNKLLQAKWDLLIPKFFLNFLCNLIYMFIFTAVAYHQPTLKKQAAPHLKAEVGNSMLLTGHILILLGGIYLLVGQLWYFWRRHVFIWISFIDSYFEILFLFQALLTVVSQVLCFLAIEWYLPLLVSALVLGWLNLLYYTRGFQHTGIYSVMIQKVILRDLLRFLLIYLVFLFGFAVALVSLSQEAWRPEAPTGPNATESVQPMEGQEDEGNGAQYRGILEASLELFKFTIGMGELAFQEQLHFRGMVLLLLLAYVLLTYILLLNMLIALMSETVNSVATDSWSIWKLQKAISVLEMENGYWWCRKKQRAGVMLTVGTKPDGSPDERWCFRVEEVNWASWEQTLPTLCEDPSGAGVPRTLENPVLASPPKEDEDGASEENYVPVQLLQSN

SEQ ID NO: 69 - DNA, 2295 bp, Homo sapiens
  CDS (1)...(2292)
  misc_feature 1995, 2000, 2118: n = A,T,C or G
  VARIANT 667: Xaa = Any Amino Acid
  ref <308>: DATABASE ACCESSION NUMBER: Genbank AAD41724
  ref <309>: DATABASE ENTRY DATE: 1999-07-01
atgacctcaccctccagctctccagttttcaggttggagacattagatggaggccaagaagatggctctgaggcggacagaggaaagctggattttgggagcgggctgcctcccatggagtcacagttccagggcgaggaccggaaattcgcctctcagataagagtcaacctcaactaccgaaagggaacaggtgccagtcagccggatccaaaccgatttgaccgagatcggctcttcaatgtggtctcccggggtgtccccgaggatctggctggacttccagagtacctgagcaagaccagcaagtacctcaccgactcggaatacacagagggctccacaggtaagacgtgcctgatgaaggctgtgctgaaccttaaggacggggtcaatgcctgcattctgccactgctgcagatcgaccgggactctggcaatcctcagcccctggtaaatgcccagtgcacagatgactattaccgaggccacagcgctctgcacatcgccattgagaagaggagtctgcagtgtgtgaagctcctggtggagaatggggccaatgtgcatgcccgggcctgcggccgcttcttccagaatggccaagggacttgcttttattttggtgagctacccctctctttggccgcttgcaccaagcagtgggatgtggtaagctacctcctggagaacccacaccagcccgccagcctgcaggccactgactcccagggcaacacagtcctgcatgccctagtgatgatctcggacaactcagctgagaacattgcactggtgaccagcatgtatgatgggctcctccaagctggggcccgcctctgccctaccgtgcagcttgaggacatccgcaacctgcaggatctcacgcctctgaagctggccgccaaggagggcaagatcgagattttcaggcacatcctgcagcgggagttttcaggactgagccacctttcccgaaagttcaccgagtggtgctatgggcctgtccgggtgtcgctgtatgacctggcttctgtggacagctgtgaggagaactcagtgctggagatcattgcctttcattgcaagagcccgcaccgacaccgaatggtcgttttggagcccctgaacaaactgctgcaggcgaaatgggatctgctcatccccaagttcttcttaaacttcctgtgtaatctgatctacatgttcatcttcaccgctgttgcctaccatcagcctaccctgaagaagcaggccgcccctcacctgaaagcggaggttggaaactccatgctgctgacgggccacatccttatcctgctaggggggatctacctcctcgtgggccaactgtggtacttctggcggcgccacctgttcatctggatctcgtacacagacagctactttgaaatcctcttcctgttccactccctgctcacagtggtgtccctggtgctgtgtttcctggtcatcgagtggtacctgcccctgcttgtgtctgcgctggtgctgggctggctgaacctgctttactatacacgtggcttccagcacacaggcatctacagtgtcatgatccagaaggtcatcctgcgggacatggtgcgcttccttgtgatctacttagtcttccttttcggcttcgctgtagccctggtgagcctgagccaggaggcttggcgccccgaagctcctacaggccccaatgccacagagtcagtgcagcccatggagggacaggaggacgagggcaacggggcccagtacaggggtatcctggaagcctccttggagctcttcaaattcaccatcggcatgggcgagctggccttccaggagcagctgcacttccgcggcatggtgctgctgctgctgctggcctacgtgctgctcacctacatcctgctgctcaacatgctcatcgccctcatgagcgagaccgtcaacagtgtcgccactgacagctggagcatctggaagctgcagaaagcnatctntgtcctggagatggagaatggctattggtggtgcaggaagaagcagcgggcaggtgtgatgctgaccgttggcactaagccagatggcagccccgatgagcgctggtgcttcagggtngaggaggtgaactgggcttcatgggagcagacgctgcctacgctgtgtgaggacccgtcaggggcaggtgtccctcgaactctcgagaaccctgtcctggcttcccctcccaaggaggatgaggatggtgcctctgaggaaaactatgtgcccgtccagctcctccagtccaactga

SEQ ID NO: 70 - protein, 764 aa, Homo sapiens
  VARIANT 667: Xaa = Any Amino Acid
  ref <308>: DATABASE ACCESSION NUMBER: Genbank AAD41724
  ref <309>: DATABASE ENTRY DATE: 1999-07-01
MTSPSSSPVFRLETLDGGQEDGSEADRGKLDFGSGLPPMESQFQGEDRKFASQIRVNLNYRKGTGASQPDPNRFDRDRLFNVVSRGVPEDLAGLPEYLSKTSKYLTDSEYTEGSTGKTCLMKAVLNLKDGVNACILPLLQIDRDSGNPQPLVNAQCTDDYYRGHSALHIAIEKRSLQCVKLLVENGANVHARACGRFFQNGQGTCFYFGELPLSLAACTKQWDVVSYLLENPHQPASLQATDSQGNTVLHALVMISDNSAENIALVTSMYDGLLQAGARLCPTVQLEDIRNLQDLTPLKLAAKEGKIEIFRHILQREFSGLSHLSRKFTEWCYGPVRVSLYDLASVDSCEENSVLEIIAFHCKSPHRHRMVVLEPLNKLLQAKWDLLIPKFFLNFLCNLIYMFIFTAVAYHQPTLKKQAAPHLKAEVGNSMLLTGHILILLGGIYLLVGQLWYFWRRHLFIWISYTDSYFEILFLFHSLLTVVSLVLCFLVIEWYLPLLVSALVLGWLNLLYYTRGFQHTGIYSVMIQKVILRDMVRFLVIYLVFLFGFAVALVSLSQEAWRPEAPTGPNATESVQPMEGQEDEGNGAQYRGILEASLELFKFTIGMGELAFQEQLHFRGMVLLLLLAYVLLTYILLLNMLIALMSETVNSVATDSWSIWKLQKAIXVLEMENGYWWCRKKQRAGVMLTVGTKPDGSPDERWCFRVEEVNWASWEQTLPTLCEDPSGAGVPRTLENPVLASPPKEDEDGASEENYVPVQLLQSN

SEQ ID NO: 71 - DNA, 2337 bp, Rattus norvegicus
  CDS (1)...(2334)
  ref <308>: DATABASE ACCESSION NUMBER: Genbank BAA94306
  ref <309>: DATABASE ENTRY DATE: 2000-05-12
atggaacaacgggctagcttagactcagaggagtctgagtccccaccccaagataactcctgcctggaccctccagacagagaccctaactgcaagccacctccagtcaagccccacatcttcactaccaggagtcgtaccgggcttttttggaagggtgactcggaggaggcctctcccctggactgcccttatgaggaaggcgggctggcttcctgccctatcatcactgtcagctctgttctaactatccagaggcctggggatggacctgccagtgtcaggcagtcatcccaggactccgtctccgctggtgagaagcccccgaggctctatgatcgcaggagcatcttcgatgctgtggctcagagtaactgccaggagctggagagcctgctgcccttcctgcagaggagcaagaagcgcctgactgacagcgagttcaaagacccagagacaggaaagacctgtctgctaaaagccatgctcaatctgcacaatgggcagaatgacaccatcgctctgctcctggacgttgcccggaagacagacagcctgaagcagtttgtcaatgccagctacacagacagctactacaagggccagacagcactgcacattgccattgaacggcggaacatgacgctggtgaccctcttggtggagaatggagcagatgtccaggctgcggctaacggggacttcttcaagaaaaccaaagggaggcctggcttctactttggtgagctgcccctgtccctggctgcgtgcaccaaccagctggccattgtgaagttcctgctgcagaactcctggcagcctgcagacatcagcgcccgggactcagtgggcaacacggtgcttcatgccctggtggaggtggcagataacacagttgacaacaccaagttcgtgacaagcatgtacaacgagatcttgatcctgggggccaaactccaccccacgctgaagctggaagagatcaccaacaggaaggggctcacgccactggctctggctgctagcagtgggaagatcgggaaccgtcatgacatgcttctcgtggaacccttgaaccgactcctacaggacaagtgggacagatttgtcaagcgcatcttctacttcaacttcttcgtttactgcttgtatatgatcatcttcaccgcggctgcctactatcggcctgtggaaggcttgcccccctataagctgaaaaacaccgttggggactatttccgagtcaccggagagatcttgtctgtgtcaggaggagtctacttcttcttccgagggattcaatatttcctgcagaggcgaccatccctcaagagtttgtttgtggacagctacagtgagatacttttctttgtacagtcgctgttcatgctggtgtctgtggtactgtacttcagccaacgcaaggagtatgtggcttccatggtgttctccctggccatgggctggaccaacatgctctactatacccgaggattccagcagatgggcatctatgctgtcatgattgagaagatgatcctcagagacctgtgccggtttatgttcgtctacctcgtgttcttgtttggattttccacagctgtggtgacactgattgaggatgggaagaataactctctgcctatggagtccacaccacacaagtgccgggggtctgcctgcaagccaggtaactcttacaacagcctgtattccacatgtctggagctgttcaagttcaccatcggcatgggcgacctggagttcactgagaactacgacttcaaggctgtcttcatcatcctgttactggcctatgtgattctcacctacatccttctgctcaacatgctcattgctctcatgggtgagaccgtcaacaagattgcacaagagagcaagaacatctggaagctgcagagagccatcaccatcctggatacagagaagagcttcctgaagtgcatgaggaaggccttccgctctggcaagctgctgcaggtggggttcactcctgacggccaggatgactaccggtggtgtttcagggtggacgaggtaaactggactacctggaacaccaatgtgggtatcatcaacgaggacccaggcaactgtgagggcgtcaagcgcaccctgagcttctccctgaggtcaggccgagtttcagggagaaactggaagaactttgccctggttccccttctgagggatgcaagcactcgagatagacatgccacccagcaggaagaagttcaactgaagcattatacgggatcccttaagccagaggatgctgaggttttcaaggattccatggtcccaggggagaaataa

SEQ ID NO: 72 - protein, 778 aa, Rattus norvegicus
  ref <308>: DATABASE ACCESSION NUMBER: Genbank BAA94306
  ref <309>: DATABASE ENTRY DATE: 2000-05-12
MEQRASLDSEESESPPQDNSCLDPPDRDPNCKPPPVKPHIFTTRSRTGLFWKGDSEEASPLDCPYEEGGLASCPIITVSSVLTIQRPGDGPASVRQSSQDSVSAGEKPPRLYDRRSIFDAVAQSNCQELESLLPFLQRSKKRLTDSEFKDPETGKTCLLKAMLNLHNGQNDTIALLLDVARKTDSLKQFVNASYTDSYYKGQTALHIAIERRNMTLVTLLVENGADVQAAANGDFFKKTKGRPGFYFGELPLSLAACTNQLAIVKFLLQNSWQPADISARDSVGNTVLHALVEVADNTVDNTKFVTSMYNEILILGAKLHPTLKLEEITNRKGLTPLALAASSGKIGNRHDMLLVEPLNRLLQDKWDRFVKRIFYFNFFVYCLYMIIFTAAAYYRPVEGLPPYKLKNTVGDYFRVTGEILSVSGGVYFFFRGIQYFLQRRPSLKSLFVDSYSEILFFVQSLFMLVSVVLYFSQRKEYVASMVFSLAMGWTNMLYYTRGFQQMGIYAVMIEKMILRDLCRFMFVYLVFLFGFSTAVVTLIEDGKNNSLPMESTPHKCRGSACKPGNSYNSLYSTCLELFKFTIGMGDLEFTENYDFKAVFIILLLAYVILTYILLLNMLIALMGETVNKIAQESKNIWKLQRAITILDTEKSFLKCMRKAFRSGKLLQVGFTPDGQDDYRWCFRVDEVNWTTWNTNVGIINEDPGNCEGVKRTLSFSLRSGRVSGRNWKNFALVPLLRDASTRDRHATQQEEVQLKHYTGSLKPEDAEVFKDSMVPGEK

SEQ ID NO: 73 - DNA, 2520 bp, Homo sapiens
  CDS (1)...(2517)
  ref <308>: DATABASE ACCESSION NUMBER: Genbank CAB66735
  ref <309>: DATABASE ENTRY DATE: 2002-03-20
atgaagaaatggagcagcacagacttgggggcagctgcggacccactccaaaaggacacctgcccagaccccctggatggagaccctaactccaggccacctccagccaagccccagctctccacggccaagagccgcacccggctctttgggaagggtgactcggaggaggctttcccggtggattgccctcacgaggaaggtgagctggactcctgcccgaccatcacagtcagccctgttatcaccatccagaggccaggagacggccccaccggtgccaggctgctgtcccaggactctgtcgccgccagcaccgagaagaccctcaggctctatgatcgcaggagtatctttgaagccgttgctcagaataactgccaggatctggagagcctgctgctcttcctgcagaagagcaagaagcacctcacagacaacgagttcaaagaccctgagacagggaagacctgtctgctgaaagccatgctcaacctgcatgacggacagaacaccaccatccccctgctcctggagatcgcgcggcaaacggacagcctgaaggagcttgtcaacgccagctacacggacagctactacaagggccagacagcactgcacatcgccatcgagagacgcaacatggccctggtgaccctcctggtggagaacggagcagacgtccaggctgcggcccatggggacttctttaagaaaaccaaagggcggcctggattctacttcggtgaactgcccctgtccctggccgcgtgcaccaaccagctgggcatcgtgaagttcctgctgcagaactcctggcagacggccgacatcagcgccagggactcggtgggcaacacggtgctgcacgccctggtggaggtggccgacaacacggccgacaacacgaagtttgtgacgagcatgtacaatgagattctgatcctgggggccaaactgcacccgacgctgaagctggaggagctcaccaacaagaagggaatgacgccgctggctctggcagctgggaccgggaagatcggggtcttggcctatattctccagcgggagatccaggagcccgagtgcaggcacctgtccaggaagttcaccgagtgggcctacgggcccgtgcactcctcgctgtacgacctgtcctgcatcgacacctgcgagaagaactcggtgctggaggtgatcgcctacagcagcagcgagacccctaatcgccacgacatgctcttggtggagccgctgaaccgactcctgcaggacaagtgggacagattcgtcaagcgcatcttctacttcaacttcctggtctactgcctgtacatgatcatcttcaccatggctgcctactacaggcccgtggatggcttgcctccctttaagatggaaaaaattggagactatttccgagttactggagagatcctgtctgtgttaggaggagtctacttctttttccgagggattcagtatttcctgcagaggcggccgtcgatgaagaccctgtttgtggacagctacagtgagatgcttttctttctgcagtcactgttcatgctggccaccgtggtgctgtacttcagccacctcaaggagtatgtggcttccatggtattctccctggccttgggctggaccaacatgctctactacacccgcggtttccagcagatgggcatctatgccgtcatgatagagaagatgatcctgagagacctgtgccgtttcatgtttgtctacatcgtcttcttgttcgggttttccacagcggtggtgacgctgattgaagacgggaagaatgactccctgccgtctgagtccacgtcgcacaggtggcgggggcctgcctgcaggccccccgatagctcctacaacagcctgtactccacctgcctggagctgttcaagttcaccatcggcatgggcgacctggagttcactgagaactatgacttcaaggctgtcttcatcatcctgctgctggcctatgtaattctcacctacatcctcctgctcaacatgctcatcgccctcatgggtgagactgtcaacaagatcgcacaggagagcaagaacatctggaagctgcagagagccatcaccatcctggacacggagaagagcttccttaagtgcatgaggaaggccttccgctcaggcaagctgctgcaggtggggtacacacctgatggcaaggacgactaccggtggtgcttcagggtggacgaggtgaactggaccacctggaacaccaacgtgggcatcatcaacgaagacccgggcaactgtgagggcgtcaagcgcaccctgagcttctccctgcggtcaagcagagtttcaggcagacactggaagaactttgccctggtcccccttttaagagaggcaagtgctcgagataggcagtctgctcagcccgaggaagtttatctgcgacagttttcagggtctctgaagccagaggacgctgaggtcttcaagagtcctgccgcttccggggagaagtga

SEQ ID NO: 74 - protein, 839 aa, Homo sapiens [sequence omitted]

SEQ ID NO: 75 - DNA, 2496 bp, Homo sapiens
  CDS (1)...(2493)
  misc_feature 2411, 2447: n = A,T,C or G
  VARIANT 804, 816: Xaa = Any Amino Acid
  ref <308>: DATABASE ACCESSION NUMBER: Genbank XP_012261
  ref <309>: DATABASE ENTRY DATE: 2001-10-16
atggcggattccagcgaaggcccccgcgcggggcccggggaggtggctgagctccccggggatgagagtggcaccccaggtggggaggcttttcctctctcctccctggccaatctgtttgagggggaggatggctccctttcgccctcaccggctgatgccagtcgccctgctggcccaggcgatgggcgaccaaatctgcgcatgaagttccagggcgccttccgcaagggggtgcccaaccccatcgatctgctggagtccaccctatatgagtcctcggtggtgcctgggcccaagaaagcacccatggactcactgtttgactacggcacctatcgtcaccactccagtgacaacaagaggtggaggaagaagatcatagagaagcagccgcagagccccaaagcccctgcccctcagccgccccccatcctcaaagtcttcaaccggcctatcctctttgacatcgtgtcccggggctccactgctgacctggacgggctgctcccattcttgctgacccacaagaaacgcctaactgatgaggagtttcgagagccatctacggggaagacctgcctgcccaaggccttgctgaacctgagcaatggccgcaacgacaccatccctgtgctgctggacatcgcggagcgcaccggcaacatgagggagttcattaactcgcccttccgtgacatctactatcgaggtcagacagccctgcacatcgccattgagcgtcgctgcaaacactacgtggaacttctcgtggcccagggagctgatgtccacgcccaggcccgtgggcgcttcttccagcccaaggatgaggggggctacttctactttggggagctgcccctgtcgctggctgcctgcaccaaccagccccacattgtcaactacctgacggagaacccccacaagaaggcggacatgcggcgccaggactcgcgaggcaacacagtgctgcatgcgctggtggccattgctgacaacacccgtgagaacaccaagtttgttaccaagatgtacgacctgctgctgctcaagtgtgcccgcctcttccccgacagcaacctggaggccgtgctcaacaacgacggcctctcgcccctcatgatggctgccaagacgggcaagattgggatctttcagcacatcatccggcgggaggtgacggatgaggacacacggcacctgtcccgcaagttcaaggactgggcctatgggccagtgtattcctcgctttatgacctctcctccctggacacgtgtggggaagaggcctccgtgctggagatcctggtgtacaacagcaagattgagaaccgccacgagatgctggctgtggagcccatcaatgaactgctgcgggacaagtggcgcaagttcggggccgtctccttctacatcaacgtggtctcctacctgtgtgccatggtcatcttcactctcaccgcctactaccagccgctggagggcacaccgccgtacccttaccgcaccacggtggactacctgcggctggctggcgaggtcattacgctcttcactggggtcctgttcttcttcaccaacatcaaagacttgttcatgaagaaatgccctggagtgaattctctcttcattgatggctccttccagctgctctacttcatctactctgtcctggtgatcgtctcagcagccctctacctggcagggatcgaggcctacctggccgtgatggtctttgccctggtcctgggctggatgaatgccctttacttcacccgtgggctgaagctgacggggacctatagcatcatgatccagaagattctcttcaaggaccttttccgattcctgctcgtctacttgctcttcatgatcggctacgcttcagccctggtctccctcctgaacccgtgtgccaacatgaaggtgtgcaatgaggaccagaccaactgcacagtgcccacttacccctcgtgccgtgacagcgagaccttcagcaccttcctcctggacctgtttaagctgaccatcggcatgggcgacctggagatgctgagcagcaccaagtaccccgtggtcttcatcatcctgctggtgacctacatcatcctcacctttgtgctgctcctcaacatgctcattgccctcatgggcgagacagtgggccaggtctccaaggagagcaagcacatctggaagctgcagtgggccaccaccatcctggacattgagcgctccttccccgtattcctgaggaaggccttccgctctggggagatggtcaccgtgggcaagagctcggacggcactcctgaccgcaggtggtgcttcagggtgaatgaggtgaactggtctcactggaaccagaacttgggcatcatcaacgaggacccgggcaagaatgagantcaccagtattatgcttctcgcataccgtgggccgnctccgcagggatcgctggtcctcggtggtaccccgcgtggtggaactga

SEQ ID NO: 76 - protein, 831 aa, Homo sapiens
  VARIANT 804, 816: Xaa = Any Amino Acid
  ref <308>: DATABASE ACCESSION NUMBER: Genbank XP_012261
  ref <309>: DATABASE ENTRY DATE: 2001-10-16
MADSSEGPRAGPGEVAELPGDESGTPGGEAFPLSSLANLFEGEDGSLSPSPADASRPAGPGDGRPNLRMKFQGAFRKGVPNPIDLLESTLYESSVVPGPKKAPMDSLFDYGTYRHHSSDNKRWRKKIIEKQPQSPKAPAPQPPPILKVFNRPILFDIVSRGSTADLDGLLPFLLTHKKRLTDEEFREPSTGKTCLPKALLNLSNGRNDTIPVLLDIAERTGNMREFINSPFRDIYYRGQTALHIAIERRCKHYVELLVAQGADVHAQARGRFFQPKDEGGYFYFGELPLSLAACTNQPHIVNYLTENPHKKADMRRQDSRGNTVLHALVAIADNTRENTKFVTKMYDLLLLKCARLFPDSNLEAVLNNDGLSPLMMAAKTGKIGIFQHIIRREVTDEDTRHLSRKFKDWAYGPVYSSLYDLSSLDTCGEEASVLEILVYNSKIENRHEMLAVEPINELLRDKWRKFGAVSFYINVVSYLCAMVIFTLTAYYQPLEGTPPYPYRTTVDYLRLAGEVITLFTGVLFFFTNIKDLFMKKCPGVNSLFIDGSFQLLYFIYSVLVIVSAALYLAGIEAYLAVMVFALVLGWMNALYFTRGLKLTGTYSIMIQKILFKDLFRFLLVYLLFMIGYASALVSLLNPCANMKVCNEDQTNCTVPTYPSCRDSETFSTFLLDLFKLTIGMGDLEMLSSTKYPVVFIILLVTYIILTFVLLLNMLIALMGETVGQVSKESKHIWKLQWATTILDIERSFPVFLRKAFRSGEMVTVGKSSDGTPDRRWCFRVNEVNWSHWNQNLGIINEDPGKNEXHQYYASRIPWAXSAGIAGPRWYPAWWN

SEQ ID NO: 77 - DNA, 2616 bp, Homo sapiens
  CDS (1)...(2613)
  ref <308>: DATABASE ACCESSION NUMBER: Genbank AAG16127
  ref <309>: DATABASE ENTRY DATE: 2000-09-26
atggcggattccagcgaaggcccccgcgcggggcccggggaggtggctgagctccccggggatgagagtggcaccccaggtggggaggcttttcctctctcctccctggccaatctgtttgagggggaggatggctccctttcgccctcaccggctgatgccagtcgccctgctggcccaggcgatgggcgaccaaatctgcgcatgaagttccagggcgccttccgcaagggggtgcccaaccccatcgatctgctggagtccaccctatatgagtcctcggtggtgcctgggcccaagaaagcacccatggactcactgtttgactacggcacctatcgtcaccactccagtgacaacaagaggtggaggaagaagatcatagagaagcagccgcagagccccaaagcccctgcccctcagccgccccccatcctcaaagtcttcaaccggcctatcctctttgacatcgtgtcccggggctccactgctgacctggacgggctgctcccattcttgctgacccacaagaaacgcctaactgatgaggagtttcgagagccatctacggggaagacctgcctgcccaaggccttgctgaacctgagcaatggccgcaacgacaccatccctgtgctgctggacatcgcggagcgcaccggcaacatgcgggagttcattaactcgcccttccgtgacatctactatcgaggtcagacagccctgcacatcgccattgagcgtcgctgcaaacactacgtggaacttctcgtggcccagggagctgatgtccacgcccaggcccgtgggcgcttcttccagcccaaggatgaggggggctacttctactttggggagctgcccctgtcgctggctgcctgcaccaaccagccccacattgtcaactacctgacggagaacccccacaagaaggcggacatgcggcgccaggactcgcgaggcaacacagtgctgcatgcgctggtggccattgctgacaacacccgtgagaacaccaagtttgttaccaagatgtacgacctgctgctgctcaagtgtgcccgcctcttccccgacagcaacctggaggccgtgctcaacaacgacggcctctcgcccctcatgatggctgccaagacgggcaagattgggatctttcagcacatcatccggcgggaggtgacggatgaggacacacggcacctgtcccgcaagttcaaggactgggcctatgggccagtgtattcctcgctttatgacctctcctccctggacacgtgtggggaagaggcctccgtgctggagatcctggtgtacaacagcaagattgagaaccgccacgagatgctggctgtggagcccatcaatgaactgctgcgggacaagtggcgcaagttcggggccgtctccttctacatcaacgtggtctcctacctgtgtgccatggtcatcttcactctcaccgcctactaccagccgctggagggcacaccgccgtacccttaccgcaccacggtggactacctgcggctggctggcgaggtcattacgctcttcactggggtcctgttcttcttcaccaacatcaaagacttgttcatgaagaaatgccctggagtgaattctctcttcattgatggctccttccagctgctctacttcatctactctgtcctggtgatcgtctcagcagccctctacctggcagggatcgaggcctacctggccgtgatggtctttgccctggtcctgggctggatgaatgccctttacttcacccgtgggctgaagctgacggggacctatagcatcatgatccagaagattctcttcaaggaccttttccgattcctgctcgtctacttgctcttcatgatcggctacgcttcagccctggtctccctcctgaacccgtgtgccaacatgaaggtgtgcaatgaggaccagaccaactgcacagtgcccacttacccctcgtgccgtgacagcgagaccttcagcaccttcctcctggacctgtttaagctgaccatcggcatgggcgacctggagatgctgagcagcaccaagtaccccgtggtcttcatcatcctgctggtgacctacatcatcctcacctttgtgctgctcctcaacatgctcattgccctcatgggcgagacagtgggccaggtctccaaggagagcaagcacatctggaagctgcagtgggccaccaccatcctggacattgagcgctccttccccgtattcctgaggaaggccttccgctctggggagatggtcaccgtgggcaagagctcggacggcactcctgaccgcaggtggtgcttcagggtggatgaggtgaactggtctcactggaaccagaacttgggcatcatcaacgaggacccgggcaagaatgagacctaccagtattatggcttctcgcataccgtgggccgcctccgcagggatcgctggtcctcggtggtaccccgcgtggtggaactgaacaagaactcgaacccggacgaggtggtggtgcctctggacagcatggggaacccccgctgcgatggccaccagcagggttacccccgcaagtggaggactgaggacgccccgctctag

SEQ ID NO: 78 - protein, 871 aa, Homo sapiens
  ref <308>: DATABASE ACCESSION NUMBER: Genbank AAG16127
  ref <309>: DATABASE ENTRY DATE: 2000-09-26
MADSSEGPRAGPGEVAELPGDESGTPGGEAFPLSSLANLFEGEDGSLSPSPADASRPAGPGDGRPNLRMKFQGAFRKGVPNPIDLLESTLYESSVVPGPKKAPMDSLFDYGTYRHHSSDNKRWRKKIIEKQPQSPKAPAPQPPPILKVFNRPILFDIVSRGSTADLDGLLPFLLTHKKRLTDEEFREPSTGKTCLPKALLNLSNGRNDTIPVLLDIAERTGNMREFINSPFRDIYYRGQTALHIAIERRCKHYVELLVAQGADVHAQARGRFFQPKDEGGYFYFGELPLSLAACTNQPHIVNYLTENPHKKADMRRQDSRGNTVLHALVAIADNTRENTKFVTKMYDLLLLKCARLFPDSNLEAVLNNDGLSPLMMAAKTGKIGIFQHIIRREVTDEDTRHLSRKFKDWAYGPVYSSLYDLSSLDTCGEEASVLEILVYNSKIENRHEMLAVEPINELLRDKWRKFGAVSFYINVVSYLCAMVIFTLTAYYQPLEGTPPYPYRTTVDYLRLAGEVITLFTGVLFFFTNIKDLFMKKCPGVNSLFIDGSFQLLYFIYSVLVIVSAALYLAGIEAYLAVMVFALVLGWMNALYFTRGLKLTGTYSIMIQKILFKDLFRFLLVYLLFMIGYASALVSLLNPCANMKVCNEDQTNCTVPTYPSCRDSETFSTFLLDLFKLTIGMGDLEMLSSTKYPVVFIILLVTYIILTFVLLLNMLIALMGETVGQVSKESKHIWKLQWATTILDIERSFPVFLRKAFRSGEMVTVGKSSDGTPDRRWCFRVDEVNWSHWNQNLGIINEDPGKNETYQYYGFSHTVGRLRRDRWSSVVPRVVELNKNSNPDEVVVPLDSMGNPRCDGHQQGYPRKWRTEDAPL

SEQ ID NO: 79 - DNA, 2616 bp, Mus musculus
  CDS (1)...(2613)
  ref <308>: DATABASE ACCESSION NUMBER: Genbank AAG17543
  ref <309>: DATABASE ENTRY DATE: 2000-10-02
atggcagatcctggtgatggtccccgtgcagcgcctggggaggtggctgagccccctggagatgagagtggtacctctggtggggaggccttccccctctcttccctggccaatctgtttgagggggaggaaggctcctcttctctttccccggtggatgctagccgccctgctggccctggcgatggacgtccaaacctgcgtatgaagttccagggcgctttccgcaagggggttcccaaccccattgacctgttggagtccacccggtacgagtcctcagtagtgcctgggcccaagaaagcgcccatggattccttgttcgactacggcacttaccgtcaccaccccagtgacaacaagagatggaggagaaaggtcgtggagaagcagccacagagccccaaagctcctgcaccccagccaccccccatcctcaaagtcttcaatcggcccatcctctttgacattgtgtcccggggctccactgcggacctagatggactgctctccttcttgttgacccacaagaagcgcctgactgatgaggagttccgggagccgtccacggggaagacctgcctgcccaaggcgctgctgaacctaagcaacgggcgcaacgacaccatcccggtgttgctggacattgcggagcgcaccggcaacatgcgtgaattcatcaactcgcccttcagagacatctactaccgaggccagacatccctgcacattgccatcgaacggcgctgcaagcactacgtggagctgctggtggcccagggagccgacgtgcacgcccaggcccgcggccgcttcttccagcccaaggatgagggaggctacttctactttggggagctgcccttgtccctggcagcctgcaccaaccagccgcacatcgtcaactacctgacagagaaccctcacaagaaagctgacatgaggcgacaggactcgagggggaacacggtgctgcacgcgctggtggccatcgccgacaacacccgagagaacaccaagtttgtcaccaagatgtacgacctgctgcttctcaagtgttcacgcctcttccccgacagcaacctggagacagttctcaacaatgatggcctttcgcctctcatgatggctgccaagacaggcaagatcggggtctttcagcacatcatccgacgtgaggtgacagatgaggacacccggcatctgtctcgcaagttcaaggactgggcctatgggcctgtgtattcttctctctacgacctctcctccctggacacatgcggggaggaggtgtccgtgctggagatcctggtgtacaacagcaagatcgagaaccgccatgagatgctggctgtagagcccattaacgaactgttgagagacaagtggcgtaagtttggggctgtgtccttctacatcaacgtggtctcctatctgtgtgccatggtcatcttcaccctcaccgcctactatcagccactggagggcacgccaccctacccttaccggaccacagtggactacctgaggctggctggcgaggtcatcacgctcttcacaggagtcctgttcttctttaccagtatcaaagacttgttcacgaagaaatgccctggagtgaattctctcttcgtcgatggctccttccagttactctacttcatctactctgtgctggtggttgtctctgcggcgctctacctggctgggatcgaggcctacctggctgtgatggtctttgccctggtcctgggctggatgaatgcgctgtacttcacgcgcgggttgaagctgacggggacctacagcatcatgattcagaagatcctcttcaaagacctcttccgcttcctgcttgtgtacctgctcttcatgatcggctatgcctcagccctggtcaccctcctgaatccgtgcaccaacatgaaggtctgtgacgaggaccagagcaactgcacggtgcccacgtatcctgcgtgccgcgacagcgagaccttcagcgccttcctcctggacctcttcaagctcaccatcggcatgggagacctggagatgctgagcagcgccaagtaccccgtggtcttcatcctcctgctggtcacctacatcatcctcaccttcgtgctcctgttgaacatgcttatcgccctcatgggtgagaccgtgggccaggtgtccaaggagagcaagcacatctggaagttgcagtgggccaccaccatcctggacatcgagcgttccttccctgtgttcctgaggaaggccttccgctccggagagatggtgactgtgggcaagagctcagatggcactccggaccgcaggtggtgcttcagggtggacgaggtgaactggtctcactggaaccagaacttgggcatcattaacgaggaccctggcaagagtgaaatctaccagtactatggcttctcccacaccgtggggcgccttcgtagggatcgttggtcctcggtggtgccccgcgtagtggagctgaacaagaactcaagcgcagatgaagtggtggtacccctggataacctagggaaccccaactgtgacggccaccagcagggctacgctcccaagtggaggacggacgatgccccactgtag

SEQ ID NO: 80 - protein, 871 aa, Mus musculus
  ref <308>: DATABASE ACCESSION NUMBER: Genbank AAG17543
  ref <309>: DATABASE ENTRY DATE: 2000-10-02
MADPGDGPRAAPGEVAEPPGDESGTSGGEAFPLSSLANLFEGEEGSSSLSPVDASRPAGPGDGRPNLRMKFQGAFRKGVPNPIDLLESTRYESSVVPGPKKAPMDSLFDYGTYRHHPSDNKRWRRKVVEKQPQSPKAPAPQPPPILKVFNRPILFDIVSRGSTADLDGLLSFLLTHKKRLTDEEFREPSTGKTCLPKALLNLSNGRNDTIPVLLDIAERTGNMREFINSPFRDIYYRGQTSLHIAIERRCKHYVELLVAQGADVHAQARGRFFQPKDEGGYFYFGELPLSLAACTNQPHIVNYLTENPHKKADMRRQDSRGNTVLHALVAIADNTRENTKFVTKMYDLLLLKCSRLFPDSNLETVLNNDGLSPLMMAAKTGKIGVFQHIIRREVTDEDTRHLSRKFKDWAYGPVYSSLYDLSSLDTCGEEVSVLEILVYNSKIENRHEMLAVEPINELLRDKWRKFGAVSFYINVVSYLCAMVIFTLTAYYQPLEGTPPYPYRTTVDYLRLAGEVITLFTGVLFFFTSIKDLFTKKCPGVNSLFVDGSFQLLYFIYSVLVVVSAALYLAGIEAYLAVMVFALVLGWMNALYFTRGLKLTGTYSIMIQKILFKDLFRFLLVYLLFMIGYASALVTLLNPCTNMKVCDEDQSNCTVPTYPACRDSETFSAFLLDLFKLTIGMGDLEMLSSAKYPVVFILLLVTYIILTFVLLLNMLIALMGETVGQVSKESKHIWKLQWATTILDIERSFPVFLRKAFRSGEMVTVGKSSDGTPDRRWCFRVDEVNWSHWNQNLGIINEDPGKSEIYQYYGFSHTVGRLRRDRWSSVVPRVVELNKNSSADEVVVPLDNLGNPNCDGHQQGYAPKWRTDDAPL

SEQ ID NO: 81 - DNA, 2520 bp, Homo sapiens
  CDS (1)...(2517)
  ref <308>: DATABASE ACCESSION NUMBER: Genbank AAG43466
  ref <309>: DATABASE ENTRY DATE: 2001-01-02
atgaagaaatggagcagcacagacttgggggcagctgcggacccactccaaaaggacacctgcccagaccccctggatggagaccctaactccaggccacctccagccaagccccagctctccacggccaagagccgcacccggctctttgggaagggtgactcggaggaggctttcccggtggattgccctcacgaggaaggtgagctggactcctgcccgaccatcacagtcagccctgttatcaccatccagaggccaggagacggccccaccggtgccaggctgctgtcccaggactctgtcgccgccagcaccgagaagaccctcaggctctatgatcgcaggagtatctttgaagccgttgctcagaataactgccaggatctggagagcctgctgctcttcctgcagaagagcaagaagcacctcacagacaacgagttcaaagaccctgagacagggaagacctgtctgctgaaagccatgctcaacctgcacgacggacagaacaccaccatccccctgctcctggagatcgcgcggcaaacggacagcctgaaggagcttgtcaacgccagctacacggacagctactacaagggccagacagcactgcacatcgccatcgagagacgcaacatggccctggtgaccctcctggtggagaacggagcagacgtccaggctgcggcccatggggacttctttaagaaaaccaaagggcggcctggattctacttcggtgaactgcccctgtccctggccgcgtgcaccaaccagctgggcatcgtgaagttcctgctgcagaactcctggcagacggccgacatcagcgccagggactcggtgggcaacacggtgctgcacgccctggtggaggtggccgacaacacggccgacaacacgaagtttgtgacgagcatgtacaatgagattctgatgctgggggccaaactgcacccgacgctgaagctggaggagctcaccaacaagaagggaatgacgccgctggctctggcagctgggaccgggaagatcggggtcttggcctatattctccagcgggagatccaggagcccgagtgcaggcacctgtccaggaagttcaccgagtgggcctacgggcccgtgcactcctcgctgtacgacctgtcctgcatcgacacctgcgagaagaactcggtgctggaggtgatcgcctacagcagcagcgagacccctaatcgccacgacatgctcttggtggagccgctgaaccgactcctgcaggacaagtgggacagattcgtcaagcgcatcttctacttcaacttcctggtctactgcctgtacatgatcatcttcaccatggctgcctactacaggcccgtggatggcttgcctccctttaagatggaaaaaattggagactatttccgagttactggagagatcctgtctgtgttaggaggagtctacttctttttccgagggattcagtatttcctgcagaggcggccgtcgatgaagaccctgtttgtggacagctacagtgagatgcttttctttctgcagtcactgttcatgctggccaccgtggtgctgtacttcagccacctcaaggagtatgtggcttccatggtattctccctggccttgggctggaccaacatgctctactacacccgcggtttccagcagatgggcatctatgccgtcatgatagagaagatgatcctgagagacctgtgccgtttcatgtttgtctacatcgtcttcttgttcgggttttccacagcggtggtgacgctgattgaagacgggaagaatgactccctgccgtctgagtccacgtcgcacaggtggcgggggcctgcctgcaggccccccgatagctcctacaacagcctgtactccacctgcctggagctgttcaagttcaccatcggcatgggcgacctggagttcactgagaactatgacttcaaggctgtcttcatcatcctgctgctggcctatgtaattctcacctacatcctcctgctcaacatgctcatcgccctcatgggtgagactgtcaacaagatcgcacaggagagcaagaacatctggaagctgcagagagccatcaccatcctggacacggagaagagcttccttaagtgcatgaggaaggccttccgctcaggcaagctgctgcaggtggggtacacacctgatggcaaggacgactaccggtggtgcttcagggtggacgaggtgaactggaccacctggaacaccaacgtgggcatcatcaacgaagacccgggcaactgtgagggcgtcaagcgcaccctgagcttctccctgcggtcaagcagagtttcaggcagacactggaagaactttgccctggtcccccttttaagagaggcaagtgctcgagataggcagtctgctcagcccgaggaagtttatctgcgacagttttcagggtctctgaagccagaggacgctgaggtcttcaagagtcctgccgcttccggggagaagtga

SEQ ID NO: 82 - protein, 839 aa, Homo sapiens [sequence omitted]

SEQ ID NO: 83 - DNA, 2616 bp, Mus musculus
  CDS (1)...(2613)
  ref <308>: DATABASE ACCESSION NUMBER: Genbank CAC20703
  ref <309>: DATABASE ENTRY DATE: 2001-02-13
atggcagatcctggtgatggtccccgtgcagcgcctggggaggtggctgagccccctggagatgagagtggtacctctggtggggaggccttccccctctcttccctggccaatctgtttgagggggaggaaggctcctcttctctttccccggtggatgctagccgccctgctggccctggcgatggacgtccaaacctgcgtatgaagttccagggcgctttccgcaagggggttcccaaccccattgacctgttggagtccaccctgtacgagtcctcagtagtgcctgggcccaagaaagcgcccatggattccttgttcgactacggcacttaccgtcaccaccccagtgacaacaagagatggaggagaaaggtcgtggagaagcagccacagagccccaaagctcctgcaccccagccaccccccatcctcaaagtcttcaatcggcccatcctctttgacattgtgtcccggggctccactgcggacctagatggactgctctccttcttgttgacccacaagaagcgcctgactgatgaggagttccgggagccgtccacggggaagacctgcctgcccaaggcgctgctgaacctaagcaacgggcgcaacgacaccatcccggtgttgctggacattgcggagcgcaccggcaacatgcgtgaattcatcaactcgcccttcagagacatctactaccgaggccagacatccctgcacattgccatcgaacggcgctgcaagcactacgtggagctgctggtggcccagggagccgacgtgcacgcccaggcccgcggccgcttcttccagcccaaggatgagggaggctacttctactttggggagctgcccttgtccctggcagcctgcaccaaccagccgcacatcgtcaactacctgacagagaaccctcacaagaaagctgacatgaggcgacaggactcgagggggaacacggtgctgcacgcgctggtggccatcgccgacaacacccgagagaacaccaagtttgtcaccaagatgtacgacctgctgcttctcaagtgttcacgcctcttccccgacagcaacctggagacagttctcaacaatgatggcctttcgcctctcatgatggctgccaagacaggcaagatcggggtctttcagcacatcatccgacgtgaggtgacagatgaggacacccggcatctgtctcgcaagttcaaggactgggcctatgggcctgtgtattcttctctctacgacctctcctccctggacacatgcggggaggaggtgtccgtgctggagatcctggtgtacaacagcaagatcgagaaccgccatgagatgctggctgtagagcccattaacgaactgttgagagacaagtggcgtaagtttggggctgtgtccttctacatcaacgtggtctcctatctgtgtgccatggtcatcttcaccctcaccgcctactatcagccactggagggcacgccaccctacccttaccggaccacagtggactacctgaggctggctggcgaggtcatcacgctcttcacaggagtcctgttcttctttaccagtatcaaagacttgttcacgaagaaatgccctggagtgaattctctcttcgtcgatggctccttccagttactctacttcatctactctgtgctggtggttgtctctgcggcgctctacctggctgggatcgaggcctacctggctgtgatggtctttgccctggtcctgggctggatgaatgcgctgtacttcacgcgcgggttgaagctgacggggacctacagcatcatgattcagaagatcctcttcaaagacctcttccgcttcctgcttgtgtacctgctcttcatgatcggctatgcctcagccctggtcaccctcctgaatccgtgcaccaacatgaaggtctgtgacgaggaccagagcaactgcacggtgcccacgtatcctgcgtgccgcgacagcgagaccttcagcgccttcctcctggacctcttcaagctcaccatcggcatgggagacctggagatgctgagcagcgccaagtaccccgtggtcttcatcctcctgctggtcacctacatcatcctcaccttcgtgctcctgttgaacatgcttatcgccctcatgggtgagaccgtgggccaggtgtccaaggagagcaagcacatctggaagttgcagtgggccaccaccatcctggacatcgagcgttccttccctgtgttcctgaggaaggccttccgctccggagagatggtgactgtgggcaagagctcagatggcactccggaccgcaggtggtgcttcagggtggacgaggtgaactggtctcactggaaccagaacttgggcatcattaacgaggaccctggcaagagtgaaatctaccagtactatggcttctcccacaccgtggggcgccttcgtagggatcgttggtcctcggtggtgccccgcgtagtggagctgaacaagaactcaagcgcagatgaagtggtggtacccctggataacctagggaaccccaactgtgacggccaccagcagggctacgctcccaagtggaggacggacgatgccccactgtag

SEQ ID NO: 84 - protein, 871 aa, Mus musculus
  ref <308>: DATABASE ACCESSION NUMBER: Genbank CAC20703
  ref <309>: DATABASE ENTRY DATE: 2001-02-13
MADPGDGPRAAPGEVAEPPGDESGTSGGEAFPLSSLANLFEGEEGSSSLSPVDASRPAGPGDGRPNLRMKFQGAFRKGVPNPIDLLESTLYESSVVPGPKKAPMDSLFDYGTYRHHPSDNKRWRRKVVEKQPQSPKAPAPQPPPILKVFNRPILFDIVSRGSTADLDGLLSFLLTHKKRLTDEEFREPSTGKTCLPKALLNLSNGRNDTIPVLLDIAERTGNMREFINSPFRDIYYRGQTSLHIAIERRCKHYVELLVAQGADVHAQARGRFFQPKDEGGYFYFGELPLSLAACTNQPHIVNYLTENPHKKADMRRQDSRGNTVLHALVAIADNTRENTKFVTKMYDLLLLKCSRLFPDSNLETVLNNDGLSPLMMAAKTGKIGVFQHIIRREVTDEDTRHLSRKFKDWAYGPVYSSLYDLSSLDTCGEEVSVLEILVYNSKIENRHEMLAVEPINELLRDKWRKFGAVSFYINVVSYLCAMVIFTLTAYYQPLEGTPPYPYRTTVDYLRLAGEVITLFTGVLFFFTSIKDLFTKKCPGVNSLFVDGSFQLLYFIYSVLVVVSAALYLAGIEAYLAVMVFALVLGWMNALYFTRGLKLTGTYSIMIQKILFKDLFRFLLVYLLFMIGYASALVTLLNPCTNMKVCDEDQSNCTVPTYPACRDSETFSAFLLDLFKLTIGMGDLEMLSSAKYPVVFILLLVTYIILTFVLLLNMLIALMGETVGQVSKESKHIWKLQWATTILDIERSFPVFLRKAFRSGEMVTVGKSSDGTPDRRWCFRVDEVNWSHWNQNLGIINEDPGKSEIYQYYGFSHTVGRLRRDRWSSVVPRVVELNKNSSADEVVVPLDNLGNPNCDGHQQGYAPKWRTDDAPL

SEQ ID NO: 85 - DNA, 2271 bp, Mus musculus
  CDS (1)...(2268)
  ref <308>: DATABASE ACCESSION NUMBER: Genbank BAA78478
  ref <309>: DATABASE ENTRY DATE: 1999-07-30
atgacttcagcctccaaccccccagcttttaggctggagacgtccgatggagatgaagaaggcagtgctgaggtgaacaaaggaaagaatgagccaccccccatggagtctcccttccagggagaggaccggaacttctcccctcagattaaagtgaatctcaactaccgaaagggactgggtcccagccaacaggacccaaatcggtttgaccgtgaccgactcttcagtgtggtctcccggggtgtccccgaggagctgactggactgctagagtacctgcgccggaccagcaagtacctcactgactcggcatacacagaaggctccactggaaagacgtgcctgatgaaggctgtgctgaaccttcaggatggggtcaatgcctgtatcctgccgctgctgcagattgacagggattccggcaatcctcagccccttgtcaatgcccagtgcaccgatgagttctaccgaggccacagtgcgctgcacatcgccatagagaagaggagcctgtggtgcgtgaagctgctggtagagaatggagcgaatgttcacatccgagcctgtggccgcttcttccaaaagcaccaaggaacttgtttctattttggagagctacctctttctctggcagcgtgcaccaagcagtgggatgtggtgacctacctcctggagaacccacaccagcctgccagcctggaggccaccgactccctgggcaacacagtcctgcatgctctggtaatgattgcagacaactcacctgagaacagtgcgctggtgatccacatgtatgacagccttctccaaatgggggcccgcctctgccccactgtacagcttgaggatatctgcaaccatcaaggcttaacacccctgaagttggctgccaaggaaggtaaaattgagatcttcaggcacatcctgcagcgggagttctcagggctgtaccagcccctttcccgaaagttcaccgagtggtgctacggtcctgtccgagtgtcactgtacgacctgtcctctgtggacagttgggaaaagaactcggtcctggaaatcatcgctttccattgcaagagcccgcaccggcaccgcatggtggttttagagccactgaacaagcttctgcaggagaaatgggatcggctcatcccaagattcttcttcaacttcgcctgttacttggtctacatgatcatcttcaccatagttgcctaccaccagccttccctggagcagccagccattccctcatcaaaagcgacttttggggactccatgctgctgttgggccacattctgatcctgcttgggggtatttacctcttactgggccagctgtggtacttttggcggcggcgcctgttcatctggatctcgttcatggacagttactttgaaatcctcttccttgtccaggcgctgctcacagtgctgtcccaggtgctgcgcttcgtggagactgaatggtacctccccctgttagtgtcatccctagtgctgggctggctgaacctgctttattatacacgtggctttcagcacacaggcatctacagtgtcatgatccaaaaggtcattctgcgagacctgctccgcttcctgctggtctacctagtcttccttttcggctttgctgtagccctagtaagcttgagccgggaggcccgaagtcccaaagcccctgaaaatagcaacaccactgtgacggaaaagcccacgctgggtcaggaggaggagccagtcccatatgggggcattctggatgcctccctagagctgttcaagttcaccattggtatgggtgagctggctttccaggaacagctgcgctttcgtggggtggtgctgctgttgctgttggcctacgtcctcctcacctacgtcctactgctcaacatgctcattgccctcatgagtgagactgtcaacagcgttgccactgacagctggagcatctggaagttgcagaaagccatctctgtcttggagatggagaatggttactggtggtgcaggaggaaaaggcatcgcgcagggaggctgctgaaagttggcaccaaaggggatggtatacctgatgagcgctggtgcttcagggtggaggaagtaaactgggctgcatgggagaagacccttcccaccttatctgaggatccatcaggggcaggcatcactggttataaaaagaacccaacctctaaacctgggaagaacagtgcctcagaggaagaccatctgcctcttcaggtcctccagtcccactga

SEQ ID NO: 86 - protein, 756 aa, Mus musculus
  ref <308>: DATABASE ACCESSION NUMBER: Genbank BAA78478
  ref <309>: DATABASE ENTRY DATE: 1999-07-30
MTSASNPPAFRLETSDGDEEGSAEVNKGKNEPPPMESPFQGEDRNFSPQIKVNLNYRKGLGPSQQDPNRFDRDRLFSVVSRGVPEELTGLLEYLRRTSKYLTDSAYTEGSTGKTCLMKAVLNLQDGVNACILPLLQIDRDSGNPQPLVNAQCTDEFYRGHSALHIAIEKRSLWCVKLLVENGANVHIRACGRFFQKHQGTCFYFGELPLSLAACTKQWDVVTYLLENPHQPASLEATDSLGNTVLHALVMIADNSPENSALVIHMYDSLLQMGARLCPTVQLEDICNHQGLTPLKLAAKEGKIEIFRHILQREFSGLYQPLSRKFTEWCYGPVRVSLYDLSSVDSWEKNSVLEIIAFHCKSPHRHRMVVLEPLNKLLQEKWDRLIPRFFFNFACYLVYMIIFTIVAYHQPSLEQPAIPSSKATFGDSMLLLGHILILLGGIYLLLGQLWYFWRRRLFIWISFMDSYFEILFLVQALLTVLSQVLRFVETEWYLPLLVSSLVLGWLNLLYYTRGFQHTGIYSVMIQKVILRDLLRFLLVYLVFLFGFAVALVSLSREARSPKAPENSNTTVTEKPTLGQEEEPVPYGGILDASLELFKFTIGMGELAFQEQLRFRGVVLLLLLAYVLLTYVLLLNMLIALMSETVNSVATDSWSIWKLQKAISVLEMENGYWWCRRKRHRAGRLLKVGTKGDGIPDERWCFRVEEVNWAAWEKTLPTLSEDPSGAGITGYKKNPTSKPGKNSASEEDHLPLQVLQSH

SEQ ID NO: 87 - DNA, 1587 bp, Rattus norvegicus
  CDS (1)...(1584)
  ref <308>: DATABASE ACCESSION NUMBER: Genbank BAA34942
  ref <309>: DATABASE ENTRY DATE: 1999-10-20
atgtacaacgagatcttgatcctgggggccaaactccaccccacgctgaagctggaagagatcaccaacaggaaggggctcacgccactggctctggctgctagcagtgggaagatcggggtcttggcctacattctccagagggagatccatgaacccgagtgccgacacctatccaggaagttcaccgaatgggcctatggggcagtgcactcctccctttatgacctgtcctgcattgacacctgtgaaaagaactcggttctggaggtgatcgcttacagcagcagtgagacccctaaccgtcatgacatgcttctcgtggaacccttgaaccgactcctacaggacaagtgggacagatttgtcaagcgcatcttctacttcaacttcttcgtctactgcttgtatatgatcatcttcaccgcggctgcctactatcggcctgtggaaggcttgcccccctataagctgaaaaacaccgttggggactatttccgagtcaccggagagatcttgtctgtgtcaggaggagtctacttcttcttccgagggattcaatatttcctgcagaggcgaccatccctcaagagtttgtttgtggacagctacagtgagatacttttctttgtacagtcgctgttcatgctggtgtctgtggtactgtacttcagccaacgcaaggagtatgtggcttccatggtgttctccctggccatgggctggaccaacatgctctactatacccgaggattccagcagatgggcatctatgctgtcatgattgagaagatgatcctcagagacctgtgccggtttatgttcgtctacctcgtgttcttgtttggattttccacagctgtggtgacactgattgaggatgggaagaataactctctgcctatggagtccacaccacacaagtgccgggggtctgcctgcaagccaggtaactcttacaacagcctgtattccacatgtctggagctgttcaagttcaccatcggcatgggcgacctggagttcactgagaactatgacttcaaggctgtcttcatcatcctgctgctggcctatgtaattctcacctacatcctccttctcaacatgctcattgctctcatgggtgagaccgtgggccaggtgtccaaggagagcaagcacatctggaagctgcagtgggccaccaccatcctggacatcgagcgctccttccctgtgttcctgaggaaggccttccgctccggagagatggtgacagtgggcaagagctcggatggcactccagaccgcaggtggtgcttcagggtggacgaggtgaactggtctcactggaaccagaacctgggcatcattaacgaggaccccggcaagagcgagatctaccagtactatggcttctcccataccatggggcgcctccgcagggatcgctggtcctcagtggtgccccgcgtggtggagctgaacaagaactcagacacagatgaagtggtggtccccctggataacctagggaaccccaactgtgacggccaccagcaaggttatgctcccaagtggagggcggaggacgcaccactgtag

SEQ ID NO: 88 - protein, 528 aa, Rattus norvegicus
  ref <308>: DATABASE ACCESSION NUMBER: Genbank BAA34942
  ref <309>: DATABASE ENTRY DATE: 1999-10-20
MYNEILILGAKLHPTLKLEEITNRKGLTPLALAASSGKIGVLAYILQREIHEPECRHLSRKFTEWAYGAVHSSLYDLSCIDTCEKNSVLEVIAYSSSETPNRHDMLLVEPLNRLLQDKWDRFVKRIFYFNFFVYCLYMIIFTAAAYYRPVEGLPPYKLKNTVGDYFRVTGEILSVSGGVYFFFRGIQYFLQRRPSLKSLFVDSYSEILFFVQSLFMLVSVVLYFSQRKEYVASMVFSLAMGWTNMLYYTRGFQQMGIYAVMIEKMILRDLCRFMFVYLVFLFGFSTAVVTLIEDGKNNSLPMESTPHKCRGSACKPGNSYNSLYSTCLELFKFTIGMGDLEFTENYDFKAVFIILLLAYVILTYILLLNMLIALMGETVGQVSKESKHIWKLQWATTILDIERSFPVFLRKAFRSGEMVTVGKSSDGTPDRRWCFRVDEVNWSHWNQNLGIINEDPGKSEIYQYYGFSHTMGRLRRDRWSSVVPRVVELNKNSDTDEVVVPLDNLGNPNCDGHQQGYAPKWRAEDAPL

SEQ ID NO: 89 - DNA, 2310 bp, Caenorhabditis elegans
  CDS (1)...(2307)
  ref <308>: DATABASE ACCESSION NUMBER: Genbank AAF60537
  ref <309>: DATABASE ENTRY DATE: 2002-11-21
atgggtaatgcatctagtgctgttactgctggtattaaaaatcaagttaatgcttcgaacaatgctattaataaattggctgatatgagtgggcgtggatttttagcggatctggcgatggatgctgttagaactggaaaccatgaagaattggataaacaaatattagagaaagttcaaccaatgctctataacaacggccagggagaaatgattcctctttctgatttaattgcacaaagacacaaggaacgtactggaaacacatttgcagttccagttccatcgactgaatgtagattcatttgctggaaattgaattctcgtggagctgttggtgaaacacttttacatacttgtttcttagctggtctaccgaatcatatgaaactgcttgccgaacgattgattgccatttttccgaaaataatcaacgatttctatttgagtgatgaatactacggagagactgttttgcatatggggatagtatcagaaaacgcagagtttgtaagatatctgttgaaaagtggagcagatgttcatgcaagatgctcgggaaacttctttacatgcgatgatcaaaaaggttcgagaactgatcatcctgaggtggaacatgcaattattagtaaacatacaaagtatccaggcaactttacaatgagttccaaaaaaaaccccattttcagccacatttattggggcgaatatccactttcatttgccgcgtgtctcagtcaaccggaatgcattcgaatgttagttgctcatggagcagatgtaaatgcagctgatacaaatggaaataccattttgcatatatgtacaatacatgagaactatgaaatgtttaaaatggcgttatcattgggagcagatcttcatattcaaaatcgacaaaacttaactccactaactctagctgcatttttagccaagaaagagatgatgcaaagaattgtcgaagaagaaagaactgtcaattggacatatggaagaactcagtcagcagcttatcctcttgagcacgttgattcaattgagccaactagtggtagtatcaatcagaaatccgttttaacaattgcagtttatggagagaaagtcgagcatttatcgttattacctcatcttttggaacaactggtacatcacaagtggatagcatatggaagaaaaaccctattcgctcaactttccatgttctgtatctactttatctgtgtcacctcttgttttctgcttcgaccaagtccgttcgaacgtcaacaacatattgcaaatgatttgatttgtttctatgatttcaaaacaagaagattcaacgaatcagctgtctcgacaataatttatcatcttctccatttaatttgcgttacgggggcaacactctatttagtgcaagctcttcttcatattaaaaatgttggatatcatttatatgtactcggactttctggatttccagccaaagctattttcctattttcctgtattctaatggtcatcacattttttctgagaatattttgtttggatgaagccgaggatattgtttggatagtgattgttttattaacttcattgaaatttctgttcttttgtagaggatttaagtcagttggaccattcgtcttgatgctctataaaattataattcgtgatttaatgagattcttcttgatctatttggtcattgtagttggcttctctcaagcattttatgtcatattcctcggttataagagaagtgattctggaaatcgtgaaccaagcattatgagtaacgttgcggaaagctacgtacggatgtttatcatgtcactcacagagtttactgtattttttgagcaattggaagaatgtgagcataccgttattggaaagataacattcgtagtctatatgcttctcgtaacacttttgctcattaacatgcttattgctatgatgactaatacttatacagaagtctctggaaattcattagagtggcttcgacaatggtctgcaattattctaatgatggaacaaagttttgatccagcaaccaggttacggtatcaaagaagatatggaatacgttttgatggaggtgaaaaactagttttattgttaaaagataaaatgacagaggaagaattcgagtgccagcggaagaaaatgcacgaagagcgtcgtaaattccgtgaggaacttcgcacaaaccagagaagacggccagtatttatatgcaagcaaggagcaaattatttcaaatcgaagcatcgacatactaataataagttgattattcctaccggctaa

SEQ ID NO: 90 - protein, 769 aa, Caenorhabditis elegans
  ref <308>: DATABASE ACCESSION NUMBER: Genbank AAF60537
  ref <309>: DATABASE ENTRY DATE: 2002-11-21
MGNASSAVTAGIKNQVNASNNAINKLADMSGRGFLADLAMDAVRTGNHEELDKQILEKVQPMLYNNGQGEMIPLSDLIAQRHKERTGNTFAVPVPSTECRFICWKLNSRGAVGETLLHTCFLAGLPNHMKLLAERLIAIFPKIINDFYLSDEYYGETVLHMGIVSENAEFVRYLLKSGADVHARCSGNFFTCDDQKGSRTDHPEVEHAIISKHTKYPGNFTMSSKKNPIFSHIYWGEYPLSFAACLSQPECIRMLVAHGADVNAADTNGNTILHICTIHENYEMFKMALSLGADLHIQNRQNLTPLTLAAFLAKKEMMQRIVEEERTVNWTYGRTQSAAYPLEHVDSIEPTSGSINQKSVLTIAVYGEKVEHLSLLPHLLEQLVHHKWIAYGRKTLFAQLSMFCIYFICVTSCFLLRPSPFERQQHIANDLICFYDFKTRRFNESAVSTIIYHLLHLICVTGATLYLVQALLHIKNVGYHLYVLGLSGFPAKAIFLFSCILMVITFFLRIFCLDEAEDIVWIVIVLLTSLKFLFFCRGFKSVGPFVLMLYKIIIRDLMRFFLIYLVIVVGFSQAFYVIFLGYKRSDSGNREPSIMSNVAESYVRMFIMSLTEFTVFFEQLEECEHTVIGKITFVVYMLLVTLLLINMLIAMMTNTYTEVSGNSLEWLRQWSAIILMMEQSFDPATRLRYQRRYGIRFDGGEKLVLLLKDKMTEEEFECQRKKMHEERRKFREELRTNQRRRPVFICKQGANYFKSKHRHTNNKLIIPTG

SEQ ID NO: 91 - DNA, 2703 bp, Caenorhabditis elegans
  CDS (1)...(2700)
  ref <308>: DATABASE ACCESSION NUMBER: Genbank AAC04431
  ref <309>: DATABASE ENTRY DATE: 2002-11-21
atgggttcctcatcttcaacccaatcttccatgaataactttgtgggaatgggaagattgagggaggatatgaagatttatcaacttgtagatatgcatggcggtggggaacttcttccatggctcagatatgccattataagtagtgatacttcatttatcgacgcttatttggaaacaaaagtcaaagatttcttgtataatggtggaaaaggaaagctcgtgacagttactgagttggtcaaattgcggaataaggaaagaaatgaacgacttggagcattctcacgaaagaaaggaaaaggaaaaagtgggccaaatgtattagacgatttcaatcaggaaggagaaaatgtgggagatttgaaaaaagcactaaaacttctggacggaggtggaaaaggcgggcggaatgaaagtaagtatcgagaaatttcatggaaattggaagaacgtggatcaatgggagaaacaattattggatgttgtcttcttcatgcatcggatattcataatgctcttgtcttgaagattcttgattattatccaaaattgttgaatgatattcacatttccgaagatttttacggattatcacctcttcatcaagcaattattaatacggattgtaaactcgtttacaagtttttgaaattgggagccgatgttaattcaagatgttatggagcatttttctgtgctgatgatcaaaaagcatcaagaactgattcattagaacatgaatatgttgaactttcattgaaaactaattatacaggaaacatgtatcttggagaatatccattgtcatttgctgcctgtttgaatcaacctgaatcatttcgccttcttcttgctttcaaggcaaatccaaatgctcaagatacaaatggaaactctgttctccatatgtgtgtcattcatgaaaatatggcaatgttcaagctagcattagaatgtggagcaagtcttcgtactgttaacaaacaaagtctttctccgttaacacttgcggcgaaattggcaaaaaaggaaatgttcgacgagatattagaattggaaggagacagtgtatgggcttatggtgatgcttcatcaacagcttacccactggcaaagatcgatacaatcaatgaaacaactggagaattgaatgaagcttctgcactttcacttgtggtttatgggcaaactgttgagcatcttgaacttttggatggcctattggatacattgctggaagcgaaatgggaagcatttgccaaaagaaatatgattgtgtcattcactgccttcacattgtactacatatgttttgtaactgcattcacattgaggccaattggattttcaacggaaatgttaactgaaggatggatcaatcgatattcggaaccatttccgggaagatacggaaaaaactcaactcttcaacaagttaaaccagtgattaatgcaacatcgcgtggattggttgaatggtcggaacctttgagccaatgtcatcttcgtaactactgggatccagatattccatttgccaattcatacatccgtcttgtttttgaattatttgttgtaattggaatttgtgttcaagtgtttcttgatttccgtgatattaagagaattggaagaaaaaagtggtggaatgtgttgactgctttccctgctaaaatcacgttcaaattaacatattttctggttctcgcaatgattccaactcgtctggcatgtgatttaagtccggtacttttggttgttgacaacgttctcatcacagttaccatgatctttacaactgtacactatctctattattgtcgtgttattcgatttgtgggaccattcgttttgatggtttatacaattattgccactgacattttccggtttatgctcatttacggaatattcttgatgggattttcccaatctttttcattgatttttttgtcttgtgaacgggaagccaatgttatcaaaaaactgatcactgatcaatcagaagcatcggaaggttcggacaataaatttaatttaacaagacaaatcagtgcatatgacaccgcgattgtgaaaaacgcagaagtctttgagaatgtaatgcaatcacccattgaagctttcgttcgtacatttattctaacaattggagagtttacagtactttaccgtaaccttgctctttgtcccgccaatacgatggtttggattggaaaagttgtattcattcttttcgaattgttcgtaagtattatgcagtttaatatgcttattgccatgatgacacgtacatatgaaacaatcttccagacacaactggagtataaacgacagagagctcaagtaattttgatgttagagctttctttgagtccaaaagaacgtcaccaatatcttctgaaatactcaagaccaactggaacaaacaagaaaacaagaagtttggttgtcagcaagaaatcagcgttttcccgcgactccaaaaagggacagaaagtactggaagaaaagatgaaaaagatgatcgaagagaaaaaagcagtgttgaaacggaaaatgaaggatatggaaatcaaggaaggaatccgtcccgtcactggatacagtcgtacacctcgtccacatactcaatatatgaatcgaggggctggtggaggtgccaatggtgttcagaatggaaatggtgctgctcactga

SEQ ID NO: 92 - protein, 900 aa, Caenorhabditis elegans
  ref <308>: DATABASE ACCESSION NUMBER: Genbank AAC04431
  ref <309>: DATABASE ENTRY DATE: 2002-11-21
MGSSSSTQSSMNNFVGMGRLREDMKIYQLVDMHGGGELLPWLRYAIISSDTSFIDAYLETKVKDFLYNGGKGKLVTVTELVKLRNKERNERLGAFSRKKGKGKSGPNVLDDFNQEGENVGDLKKALKLLDGGGKGGRNESKYREISWKLEERGSMGETIIGCCLLHASDIHNALVLKILDYYPKLLNDIHISEDFYGLSPLHQAIINTDCKLVYKFLKLGADVNSRCYGAFFCADDQKASRTDSLEHEYVELSLKTNYTGNMYLGEYPLSFAACLNQPESFRLLLAFKANPNAQDTNGNSVLHMCVIHENMAMFKLALECGASLRTVNKQSLSPLTLAAKLAKKEMFDEILELEGDSVWAYGDASSTAYPLAKIDTINETTGELNEASALSLVVYGQTVEHLELLDGLLDTLLEAKWEAFAKRNMIVSFTAFTLYYICFVTAFTLRPIGFSTEMLTEGWINRYSEPFPGRYGKNSTLQQVKPVINATSRGLVEWSEPLSQCHLRNYWDPDIPFANSYIRLVFELFVVIGICVQVFLDFRDIKRIGRKKWWNVLTAFPAKITFKLTYFLVLAMIPTRLACDLSPVLLVVDNVLITVTMIFTTVHYLYYCRVIRFVGPFVLMVYTIIATDIFRFMLIYGIFLMGFSQSFSLIFLSCEREANVIKKLITDQSEASEGSDNKFNLTRQISAYDTAIVKNAEVFENVMQSPIEAFVRTFILTIGEFTVLYRNLALCPANTMVWIGKVVFILFELFVSIMQFNMLIAMMTRTYETIFQTQLEYKRQRAQVILMLELSLSPKERHQYLLKYSRPTGTNKKTRSLVVSKKSAFSRDSKKGQKVLEEKMKKMIEEKKAVLKRKMKDMEIKEGIRPVTGYSRTPRPHTQYMNRGAGGGANGVQNGNGAAH

SEQ ID NO: 93 - DNA, 2373 bp, Caenorhabditis elegans
  CDS (1)...(2700)
  ref <308>: DATABASE ACCESSION NUMBER: Genbank CAA98449
  ref <309>: DATABASE ENTRY DATE: 2002-11-12
atgggtactaaaaattcaaagattgccgatggagctgcacaagtggaacagacaatggctcgtaccatgtctgagaacaaagtcatttacaaaatggttgacatgcacggaggaggtattcttataaagctggcaagaaagtgcaaagagctcaattcatttgttctccttgatgcgtatcttgaccaggaagttcggaagtacatgtataatggcggaaaaggaaaattaatgccagtggcggagcttgtcaaggctagaaataaggaaagaaatgcaaagcttggagcattctctcggaagaaaggaaaaggtaaaagtggaccaaatattttggatgaattcgatcagggacaagctgaaatggctggagatcttaaaaaagctttgaaacttcttgacggtggcggaaaaggtggaaaatcagagtcaaaatatcgagaaatggtatggagcgttgatgaaagaggttcaatgggagaaaacctattggctatatgtctccttcagggaagtgctcttcacaatttgattgcacggcgattgatcaatttttttcccaaactgatcaatgacatttgtgtttctgaagaatactacggtttgtccccattacacttggcaattgtaaaccaggatgcacaattcacttcattacttctccgtcttggcgctgatttgaatcagagatgttatggagcattcttttgtgcagatgatcaaaaagccagtcgaactgatagtttggagcacgaatttgtagagctcacaaagaatacaaattatactggatcaatgtattttggagaatatccactatcatttgctatttgcatgggacaacatgatcttttccgaatgcttcttgccaaaaaagcaaatttaagtgctcaggacaccaacgggaatactgcactgcatttatgtgtgattcatgataaaatggatatgttagatgccgttttggaagctggtggaaatataagattagccaacaaacaaaatttgaccgcgctcactttggccgcaagattggccaagaaaactgaatcaattcaacatctagagcttatggatggattaattgaacaaattttggatgaaaagtggaaagcatatggaagagctctttggctcagatctcttctcggattcattttcttttattgttgttttgtatgtgcctacatgcttcgtccatcttcagcaactactgaacacctaactcgtggacgtatcaatgatgatggagaaactgaatctacaaactcaacaaactacctacaatggcatgcaattgatacacaatgtcatttaatgtattattctgcatggccatggtatcatggatggtttcgtcttggttgtgagattatgacaattattgttatgctattccaaatattacttgactttggtgatattagacgaattggatttcaaaaatggttcaactttctgaaagcattccctgcaaagcttatgtttaaaggagcatttctttttattatcatttcaattccttgtagacttgcttgttcttttcatgagtttttcctaacaattgacaataccatggcaattatcagtatacttcttgtcactcaacactttttatattacatgagagcaattccatttgttggacctttcgttttaatggtttatacaataatagcaacagatcttgtcagatttgcaatgatttattctatatttctagttggtttctctcaatctttttacttgatttttacttcttgtgaacgtgactctactgcaatcaagaaaattgatcctatgggttcggagttcaataatattatggaaaaccctgttgatgctcttcttcgtacatttatcatgacaattggagagttttctgttctttatcgtgaaatgtcagcttgtgataatttctggatgaaatggatcgggaaacttatattcgtaatctttgagacatttgtatcaattctccaattcaatttgcttattgccatgatgactagaacttatgaaacaatatttttgacacgaaaggagtggaaaaggcaatgggctcaagtcattctaatgttggaaatgggattatcacctgcaagtcggaagatgcatttacttagatatacaagaccaactggtatcaataaaagagttagaagttatgttgtggtatctaaaggagaagtagtttttgataattactgcggaagcaagtcatatttcttatctgattcaaacttttacaactttcaggaacacgaagtgaaggcaaaggcactggcaatgatgagtgccaaactccacattgaggtcaaaaaacgaagaattctcaggcagcaaactgttgatgcaaactcgaagatgtga

SEQ ID NO: 94 - protein, 790 aa, Caenorhabditis elegans
  ref <308>: DATABASE ACCESSION NUMBER: Genbank CAA98449
  ref <309>: DATABASE ENTRY DATE: 2002-11-12
MGTKNSKIADGAAQVEQTMARTMSENKVIYKMVDMHGGGILIKLARKCKELNSFVLLDAYLDQEVRKYMYNGGKGKLMPVAELVKARNKERNAKLGAFSRKKGKGKSGPNILDEFDQGQAEMAGDLKKALKLLDGGGKGGKSESKYREMVWSVDERGSMGENLLAICLLQGSALHNLIARRLINFFPKLINDICVSEEYYGLSPLHLAIVNQDAQFTSLLLRLGADLNQRCYGAFFCADDQKASRTDSLEHEFVELTKNTNYTGSMYFGEYPLSFAICMGQHDLFRMLLAKKANLSAQDTNGNTALHLCVIHDKMDMLDAVLEAGGNIRLANKQNLTALTLAARLAKKTESIQHLELMDGLIEQILDEKWKAYGRALWLRSLLGFIFFYCCFVCAYMLRPSSATTEHLTRGRINDDGETESTNSTNYLQWHAIDTQCHLMYYSAWPWYHGWFRLGCEIMTIIVMLFQILLDFGDIRRIGFQKWFNFLKAFPAKLMFKGAFLFIIISIPCRLACSFHEFFLTIDNTMAIISILLVTQHFLYYMRAIPFVGPFVLMVYTIIATDLVRFAMIYSIFLVGFSQSFYLIFTSCERDSTAIKKIDPMGSEFNNIMENPVDALLRTFIMTIGEFSVLYREMSACDNFWMKWIGKLIFVIFETFVSILQFNLLIAMMTRTYETIFLTRKEWKRQWAQVILMLEMGLSPASRKMHLLRYTRPTGINKRVRSYVVVSKGEVVFDNYCGSKSYFLSDSNFYNFQEHEVKAKALAMMSAKLHIEVKKRRILRQQTVDANSKM

SEQ ID NO: 95 - DNA, 2370 bp, Caenorhabditis elegans
  CDS (1)...(2367)
  ref <308>: DATABASE ACCESSION NUMBER: Genbank CAA96679
  ref <309>: DATABASE ENTRY DATE: 2002-11-26
atgtcgttcaactcctcagatgtcccgtcaacgttatattctttggtggatgaacaaggtggtggaattttatcgccatggataaaatatgcgaggtcttctggtgactacagtattttagaagagtatttggatactgcagtgaaatcatacctgtacaatggtggaaaaggaaaacttgtgccgatttcacaactcgtcactatccggaacaaacagagaaatgcattgttgggcgcgttacgaagaaaaaaaggacggggcaaaagtggacctaatattctggaacacattgatcaagatgctctgtcgtctggagattttctcaaggcgcttaaagttttagatggtgggatgatcaaaggaagaagaagcttcaagtacagggagctggtgtgggatatggatcagagaggtcgccttggagaaaacctgctgcacgtctgcatgttattgaataccgcagacatgaacgaacttgtgaaacaaatgacatatagattcccaaaaattgtcaacgatattttcctatcagaagaatattatgcttctgtaggattatcaccattacatcaagcaatagttaatgaagacttggagatggtgtattttttatgccgcaaaggagctgatgttcatcaaaggtgctatggatcatttttctgtgctgatgaccagaaagcatcaagaactgattcattggagcatgagtgggtggatttagtgcaaagcaccaagtatacaggacaaatgtactggggcgagtacccgttgtcattcgcggcgtgcacaaaccaagtggattgctttcggctccttcgcgcgatgaaagccgatcccaacatgccggacaccaatggtaacacggtgcttcatctgacagttatacatgatctacctgaaatgttcatgttggcagtggaactcggcgctaatttgcacgtgagaaacaatttaaagcttacgcctttagcattggcagctagactggcaaagaagcatatttacgatttgatattggaatgtgacatggacatttcatggaggtatggaccggtggtctgtaaggcctatccacttaatgatgtggacactatcaacgaaagtgatggctcgctcaacccaaactcagttatagcgaatgtagtgtacggagacaaagtggatcatttggagttttttgatgggctcattgaggaagtcttggagagcaagtgggagactttcggcaaaaaacaactttttatgtcactcgctggatatatatactttctggcggtgttttatctcgctttcatgaccagagatgcccacattctcccaagtgatgaggacgaaaatgaaaagtttggaatgattgaactagatttctcaaatttcacaaatattctcagcgaggggttaagtttgagagaacatttagcaattgcgagaatggcagaaagagaagctctaccagcacactgccatctttgggattattcaggaccatcgcaacaggtaaaaggcaggaaggccttccctgagaaagttctccataagttctgccaaattcttgtgttatgcacagttccactccgtgttggatgttatttggacgatagttttctagtcattgagaacttgctagtggtgtgcattgtaatcatgagtactttgcattttcttttttattgcagaagtcttaaatttgtcgggccatttgtgttgatggtgtacaaaattattgtgagagatatgctgcgatttttgcttatatactcgtttttcttaatgggatttgcacaagcattttttgttatattcaaatcctgtgagagagcagaaattgcttatcagaaagctcataactatactgaagacgatgaatatattgagaaatttgaaaacatcatggaagatggttgggaggcagtgatgagaatgtttattatgagtgtgggagaatttggtgcactttataaaaacttgaacgagtgcaaaagcagcattgctccacagtccaaggtatttttcatcctcttcgagttaattgtgactgttatgcttctgaatctactaattgctatgatgactcgtacttatgagaaaattgccgaaactgagaaagaatggaagcgtcagtgggcgcaagtaattttaatgttagagcagtcatcttcagcctcggaacgcctcctatcactttatcgttatactcggccaatacgttccgataaacgaagaagagcatttgttgtgaaagtgaagtcgaatgaccgccagcaaccacaactcaaattaattccaccgcgtggaaaaccgtcaatccgcttgtcaaacaacagttccattcatgtcttacatgttctatcaaaacatgcttcgtaa

SEQ ID NO: 96 - protein, 789 aa, Caenorhabditis elegans
  ref <308>: DATABASE ACCESSION NUMBER: Genbank CAA96679
  ref <309>: DATABASE ENTRY DATE: 2002-11-26
MSFNSSDVPSTLYSLVDEQGGGILSPWIKYARSSGDYSILEEYLDTAVKSYLYNGGKGKLVPISQLVTIRNKQRNALLGALRRKKGRGKSGPNILEHIDQDALSSGDFLKALKVLDGGMIKGRRSFKYRELVWDMDQRGRLGENLLHVCMLLNTADMNELVKQMTYRFPKIVNDIFLSEEYYASVGLSPLHQAIVNEDLEMVYFLCRKGADVHQRCYGSFFCADDQKASRTDSLEHEWVDLVQSTKYTGQMYWGEYPLSFAACTNQVDCFRLLRAMKADPNMPDTNGNTVLHLTVIHDLPEMFMLAVELGANLHVRNNLKLTPLALAARLAKKHIYDLILECDMDISWRYGPVVCKAYPLNDVDTINESDGSLNPNSVIANVVYGDKVDHLEFFDGLIEEVLESKWETFGKKQLFMSLAGYIYFLAVFYLAFMTRDAHILPSDEDENEKFGMIELDFSNFTNILSEGLSLREHLAIARMAEREALPAHCHLWDYSGPSQQVKGRKAFPEKVLHKFCQILVLCTVPLRVGCYLDDSFLVIENLLVVCIVIMSTLHFLFYCRSLKFVGPFVLMVYKIIVRDMLRFLLIYSFFLMGFAQAFFVIFKSCERAEIAYQKAHNYTEDDEYIEKFENIMEDGWEAVMRMFIMSVGEFGALYKNLNECKSSIAPQSKVFFILFELIVTVMLLNLLIAMMTRTYEKIAETEKEWKRQWAQVILMLEQSSSASERLLSLYRYTRPIRSDKRRRAFVVKVKSNDRQQPQLKLIPPRGKPSIRLSNNSSIHVLHVLSKHAS

SEQ ID NO: 97 - DNA, 2289 bp, Rattus norvegicus
  CDS (1)...(2286)
  ref <308>: DATABASE ACCESSION NUMBER: Genbank BAA93435
  ref <309>: DATABASE ENTRY DATE: 2000-04-04
atgacttcagcctccagccccccagctttcaggctggagacttccgatggagatgaagagggcaatgctgaggtgaacaaggggaagcaggaaccgccccccatggagtcaccattccagagggaggaccggaattcctcccctcagatcaaagtgaacctcaacttcataaagagacctcctaaaaacacttctgctcccagccagcaggagccagatcggtttgaccgtgaccgactcttcagtgtggtctcccggggtgtccccgaggaactgactggactgctagaatacctgcgctggaacagcaagtacctcactgactctgcatacacagaaggctccactggaaagacgtgcctgatgaaggctgtgctgaaccttcaggatggggtcaatgcctgcatcatgccgctgctgcagattgacaaggattccggcaatcccaagctcctcgtcaatgcccagtgcaccgatgagttctaccaaggccacagtgcgctgcacatcgccatagagaagaggagcctgcagtgcgtgaagctgctggtagagaatggagcggatgttcacctccgagcctgtggccgcttcttccaaaagcaccaaggaacttgtttctattttggagagctacctctttctctggctgcgtgcaccaagcagtgggatgtggtgacctacctcctggagaacccacaccagccggccagcctggaggccaccgactccctgggcaacacagtcctgcatgctctggtaatgattgcagataactcgcctgagaacagtgccctggtgatccacatgtacgacgggcttctacaaatgggggcgcgcctctgccccactgtgcagcttgaggaaatctccaaccaccaaggcctcacacccctgaaactagccgccaaggaaggcaaaatcgagattttcaggcacattctgcagcgggaattctcaggaccgtaccagcccctttcccgaaagtttactgagtggtgttacggtcctgtgcgggtatcgctgtacgacctgtcctctgtggacagctgggaaaagaactcggtgctggagatcatcgcttttcattgcaagagcccgaaccggcaccgcatggtggttttagaaccactgaacaagcttctgcaggagaaatgggatcggctcgtctcaagattcttcttcaacttcgcctgctacttggtctacatgttcatcttcaccgtcgttgcctaccaccagccttccctggatcagccagccatcccctcatcaaaagcgacttttggggaatccatgctgctgctgggccacattctgatcctgcttgggggtatttacctcttactgggccagctgtggtacttttggcggcggcgcctgtttatctggatctcattcatggacagctactttgaaatcctctttctccttcaggctctgctcacagtgctgtcccaggtgctgcgcttcatggagactgaatggtacctacccctgctagtgttatccctagtgctgggctggctgaacctgctttactacacacggggctttcagcacacaggcatctacagtgtcatgatccagaaggtcatccttcgagacctgctccgtttcctgctggtctacctggtcttccttttcggctttgctgtagccctagtaagcttgagcagagaggcccgaagtcccaaagcccctgaagataacaactccacagtgacggaacagcccacggtgggccaggaggaggagccagctccatatcggagcattctggatgcctccctagagctgttcaagttcaccattggtatgggggagctggctttccaggaacagctgcgttttcgtggggtggtcctgctgttgctgttggcctacgtccttctcacctacgtcctgctgctcaacatgctcattgctctcatgagcgaaactgtcaaccacgttgctgacaacagctggagcatctggaagttgcagaaagccatctctgtcttggagatggagaatggttactggtggtgccggaggaagaaacatcgtgaagggaggctgctgaaagtcggcaccaggggggatggtacccctgatgagcgctggtgcttcagggtggaggaagtaaattgggctgcttgggagaagactcttcccaccttatctgaggatccatcagggccaggcatcactggtaataaaaagaacccaacctctaaaccggggaagaacagtgcctcagaggaagaccatctgccccttcaggttcctccagttcccccctga

SEQ ID NO: 98 - protein, 762 aa, Rattus norvegicus
  ref <308>: DATABASE ACCESSION NUMBER: Genbank BAA93435
  ref <309>: DATABASE ENTRY DATE: 2000-04-04
MTSASSPPAFRLETSDGDEEGNAEVNKGKQEPPPMESPFQREDRNSSPQIKVNLNFIKRPPKNTSAPSQQEPDRFDRDRLFSVVSRGVPEELTGLLEYLRWNSKYLTDSAYTEGSTGKTCLMKAVLNLQDGVNACIMPLLQIDKDSGNPKLLVNAQCTDEFYQGHSALHIAIEKRSLQCVKLLVENGADVHLRACGRFFQKHQGTCFYFGELPLSLAACTKQWDVVTYLLENPHQPASLEATDSLGNTVLHALVMIADNSPENSALVIHMYDGLLQMGARLCPTVQLEEISNHQGLTPLKLAAKEGKIEIFRHILQREFSGPYQPLSRKFTEWCYGPVRVSLYDLSSVDSWEKNSVLEIIAFHCKSPNRHRMVVLEPLNKLLQEKWDRLVSRFFFNFACYLVYMFIFTVVAYHQPSLDQPAIPSSKATFGESMLLLGHILILLGGIYLLLGQLWYFWRRRLFIWISFMDSYFEILFLLQALLTVLSQVLRFMETEWYLPLLVLSLVLGWLNLLYYTRGFQHTGIYSVMIQKVILRDLLRFLLVYLVFLFGFAVALVSLSREARSPKAPEDNNSTVTEQPTVGQEEEPAPYRSILDASLELFKFTIGMGELAFQEQLRFRGVVLLLLLAYVLLTYVLLLNMLIALMSETVNHVADNSWSIWKLQKAISVLEMENGYWWCRRKKHREGRLLKVGTRGDGTPDERWCFRVEEVNWAAWEKTLPTLSEDPSGPGITGNKKNPTSKPGKNSASEEDHLPLQVPPVPP

SEQ ID NO: 99 - DNA, 2368 bp, Drosophila melanogaster
  CDS (95)...(1711)
  ref <308>: DATABASE ACCESSION NUMBER: Genbank P40797
  ref <309>: DATABASE ENTRY DATE: 1995-02-01
cgcaacggttctgtgcaagcaaagtgaataaatacagtgaagcccatctgcgaacgaatatcgaaggctcaaaggcgaatttggcgctattccaatgaatagtcctcgctcgaacgcggttaatggcggcagcggcggcgccatctccgctctgcccagcactctggcccaactggctctgcgcgacaagcagcaggctgcgtcggcatcggcgtcctctgccacgaacggcagcagcggcagcgagtccttggtgggcgtcggtggacgaccgcccaatcagccgcccagtgtgccagtggccgccagtggcaagctggacaccagcagcggaggcgcctccaacggcgactcgaacaaactgacccacgatctgcaggagaaggagcaccagcaggcgcagaagccacagaagccaccgctcccggtgcgccagaagcccatggagatcgccggctatgtgggcttcgccaacctgcccaatcaggtctatcgcaaggccgtcaagaggggattcgagttcactctgatggtggtgggcgccagtgggctgggcaagtcgacgctgatcaactccatgttcctgtcggacatctacaacgcggaacagtatccgggcccctcgctgcgcaaaaagaagaccgtggccgtggaggccaccaaagtaatgctcaaggagaacggcgtcaatctgacactcacggtggtggacacacccggattcggtgatgccgttgacaacagcaactgctgggtgcccatactggagtacgtggatagcaagtacgaggagtacctgaccgccgagtcgcgggtgtaccgaaaaaccatttcggacaaccgggtgcactgctgcctctacttcatagcgccatcgggacacggactcctgccgctggacattgcctgcatgcagagcctgtcggacaaggtgaatctggtaccggtgatcgccaaggcggacaccatgacacccgacgaggtgcatctattcaagaagcagatccttaacgagatcgctcagcacaagatcaagatctacgacttccccgccacgctggaggatgcggccgaggaggccaaaaccacgcagaatttgcgcagccgagtgccattcgcggtggtgggtgccaacaccatcatcgagcaggacggaaagaaggtgcggggtaggcgttatccctggggcctggtggaggtggagaacctgacgcattgcgactttatagcgctgcgcaacatggtcatacgcacgcaccttcaggacctcaaggacgtgacgaacaacgtccactacgagaactaccgctgccggaagctatccgagctgggattggtggacggcaaggccaggctgtccaacaagaacccactcacccagatggaggaggaaaagcgggagcacgagcagaagatgaagaagatggaggccgagatggagcaggtgtttgacatgaaggtcaaggagaagatgcagaagctcagggactcggagctggagctggcgcggcgccacgaggagcgcaagaaggcgctggagctgcagatccgggagctggaggagaagagacgcgagttcgagcgcgagaagaaggagtgggaggatgtcaaccacgtgacgctcgaggagctcaagcgacgcagcctgggggccaacagcagcacggacaatgtggatggcaagaaggagaagaaaaagaagggtctgttctaagtcaacacgctcaaaacccccattccccaaacccccttccgctcctcgtatacttaagcgctaatctcgagaacaaagcaaatgaaaaccctagcgtatcctactcttattcctaccacataaagtaattcgaaaagtgcataaatatatctattgttgggcccagccgccccacaaggcttctattcgcacagcaatcgtccagcgacggcgttgcatttgttttctacatactatacaagtacatataacacatagcagttgcagtattttaccaatatatatccacgcattacttgacgaaacacatttgctagcctaatgaattgaacacgcaaacgaattaaatcgagacagtaacaaacggtatttgcaaaatacttaagtatcttaaagcctaatcataataaaaactaagcagaatgtacgagtgcgaggcgaaattgatcctaaaattaattataacgaataacgaatccatgtataacgtatgctattgatattgtaattgtattttacctattatgcataaagtcattgaacacccgaacacacaccagcaaggcaaaagccgcaagcgcagcagaaaacatcaagaaacaaaatatactcttgcattttataaaataaagtcttccccttagtttaactaca

SEQ ID NO: 100 - protein, 539 aa, Drosophila melanogaster
  ref <308>: DATABASE ACCESSION NUMBER: Genbank P40797
  ref <309>: DATABASE ENTRY DATE: 1995-02-01
MNSPRSNAVNGGSGGAISALPSTLAQLALRDKQQAASASASSATNGSSGSESLVGVGGRPPNQPPSVPVAASGKLDTSSGGASNGDSNKLTHDLQEKEHQQAQKPQKPPLPVRQKPMEIAGYVGFANLPNQVYRKAVKRGFEFTLMVVGASGLGKSTLINSMFLSDIYNAEQYPGPSLRKKKTVAVEATKVMLKENGVNLTLTVVDTPGFGDAVDNSNCWVPILEYVDSKYEEYLTAESRVYRKTISDNRVHCCLYFIAPSGHGLLPLDIACMQSLSDKVNLVPVIAKADTMTPDEVHLFKKQILNEIAQHKIKIYDFPATLEDAAEEAKTTQNLRSRVPFAVVGANTIIEQDGKKVRGRRYPWGLVEVENLTHCDFIALRNMVIRTHLQDLKDVTNNVHYENYRCRKLSELGLVDGKARLSNKNPLTQMEEEKREHEQKMKKMEAEMEQVFDMKVKEKMQKLRDSELELARRHEERKKALELQIRELEEKRREFEREKKEWEDVNHVTLEELKRRSLGANSSTDNVDGKKEKKKKGLF

SEQ ID NO: 101 - DNA, 27 bp, Artificial Sequence
  5' T7 RNA polymerase binding site
gaattaatacgactcactatagggaga

SEQ ID NO: 102 - DNA, 44 bp, Artificial Sequence
  CG4536 Upper Primer (T7-162)
gaattaatacgactcactatagggagacaactcgggcggactga

SEQ ID NO: 103 - DNA, 38 bp, Artificial Sequence
  CG4536 Lower Primer (T3-647)
aattaaccctcactaaagggagatcttggccggattcg

SEQ ID NO: 104 - DNA, 43 bp, Artificial Sequence
  CG5842 Upper Primer (T7-1010)
gaattaatacgactcactatagggagaaacgggagatctattg

SEQ ID NO: 105 - DNA, 40 bp, Artificial Sequence
  CG5842 Lower Primer (T3-1464)
atttaaccctcactaaagggagactgccataatacgaagc

SEQ ID NO: 106 - DNA, 2373 bp, Homo sapiens
  CDS (1)...(2370)
  ref <308>: DATABASE ACCESSION NUMBER: Genbank AAM54027
  ref <309>: DATABASE ENTRY DATE: 2002-07-17
atgaaagcccaccccaaggagatggtgcctctcatgggcaagagagttgctgcccccagtgggaaccctgccatcctgccagagaagaggccggcggagatcacccccacaaagaagagtgcacacttcttcctggagatagaagggtttgaacccaaccccacagttgccaagacctctcctcctgtcttctccaagcccatggattccaacatccggcagtgcatctctggtaactgtgatgacatggactccccccagtctcctcaggatgatgtgacagagaccccatccaatcccaacagccccagtgcacagctggccaaggaagagcagaggaggaaaaagaggcggctgaagaagcgcatctttgcagccgtgtctgagggctgcgtggaggagttggtagagttgctggtggagctgcaggagctttgcaggcggcgccatgatgaggatgtgcctgacttcctcatgcacaagctgacggcctccgacacggggaagacctgcctgatgaaggccttgttaaacatcaaccccaacaccaaggagatagtgcggatcctgcttgcctttgctgaagagaacgacatcctgggcaggttcatcaacgccgagtacacagaggaggcctatgaagggcagacggcgctgaacatcgccatcgagcggcggcagggggacatcgcagccctgctcatcgccgccggcgccgacgtcaacgcgcacgccaagggggccttcttcaaccccaagtaccaacacgaaggcttctacttcggtgagacgcccctggccctggcagcatgcaccaaccagcccgagattgtgcagctgctgatggagcacgagcagacggacatcacctcgcgggactcacgaggcaacaacatccttcacgccctggtgaccgtggccgaggacttcaagacgcagaatgactttgtgaagcgcatgtacgacatgatcctactgcggagtggcaactgggagctggagaccactcgcaacaacgatggcctcacgccgctgcagctggccgccaagatgggcaaggcggagatcctgaagtacatcctcagtcgtgagatcaaggagaagcggctccggagcctgtccaggaagttcaccgactgggcgtacggacccgtgtcatcctccctctacgacctcaccaacgtggacaccaccacggacaactcagtgctggaaatcactgtctacaacaccaacatcgacaaccggcatgagatgctgaccctggagccgctgcacacgctgctgcatatgaagtggaagaagtttgccaagcacatgttctttctgtccttctgcttttatttcttctacaacatcaccctgaccctcgtctcgtactaccgcccccgggaggaggaggccatcccgcaccccttggccctgacgcacaagatggggtggctgcagctcctagggaggatgtttgtgctcatctgggccatgtgcatctctgtgaaagagggcattgccatcttcctgctgagaccctcggatctgcagtccatcctctcggatgcctggttccactttgtcttttttatccaagctgtgcttgtgatactgtctgtcttcttgtacttgtttgcctacaaagagtacctcgcctgcctcgtgctggccatggccctgggctgggcgaacatgctctactatacgcggggtttccagtccatgggcatgtacagcgtcatgatccagaaggtcattttgcatgatgttctgaagttcttgtttgtatatatcgtgtttttgcttggatttggagtagccttggcctcgctgatcgagaagtgtcccaaagacaacaaggactgcagctcctacggcagcttcagcgacgcagtgctggaactcttcaagctcaccataggcctgggtgacctgaacatccagcagaactccaagtatcccattctctttctgttcctgctcatcacctatgtcatcctcacctttgttctcctcctcaacatgctcattgctctgatgggcgagactgtggagaacgtctccaaggagagcgaacgcatctggcgcctgcagagagccaggaccatcttggagtttgagaaaatgttaccagaatggctgaggagcagattccggatgggagagctgtgcaaagtggccgaggatgatttccgactgtgtttgcggatcaatgaggtgaagtggactgaatggaagacgcacgtctccttccttaacgaagacccggggcctgtaagacgaacagatttcaacaaaatccaagattcttccaggaacaacagcaaaaccactctcaatgcatttgaagaagtcgaggaattcccggaaacctcggtgtag

SEQ ID NO: 107 - protein, 790 aa, Homo sapiens
  ref <308>: DATABASE ACCESSION NUMBER: Genbank AAM54027
  ref <309>: DATABASE ENTRY DATE: 2002-07-17
MKAHPKEMVPLMGKRVAAPSGNPAILPEKRPAEITPTKKSAHFFLEIEGFEPNPTVAKTSPPVFSKPMDSNIRQCISGNCDDMDSPQSPQDDVTETPSNPNSPSAQLAKEEQRRKKRRLKKRIFAAVSEGCVEELVELLVELQELCRRRHDEDVPDFLMHKLTASDTGKTCLMKALLNINPNTKEIVRILLAFAEENDILGRFINAEYTEEAYEGQTALNIAIERRQGDIAALLIAAGADVNAHAKGAFFNPKYQHEGFYFGETPLALAACTNQPEIVQLLMEHEQTDITSRDSRGNNILHALVTVAEDFKTQNDFVKRMYDMILLRSGNWELETTRNNDGLTPLQLAAKMGKAEILKYILSREIKEKRLRSLSRKFTDWAYGPVSSSLYDLTNVDTTTDNSVLEITVYNTNIDNRHEMLTLEPLHTLLHMKWKKFAKHMFFLSFCFYFFYNITLTLVSYYRPREEEAIPHPLALTHKMGWLQLLGRMFVLIWAMCISVKEGIAIFLLRPSDLQSILSDAWFHFVFFIQAVLVILSVFLYLFAYKEYLACLVLAMALGWANMLYYTRGFQSMGMYSVMIQKVILHDVLKFLFVYIVFLLGFGVALASLIEKCPKDNKDCSSYGSFSDAVLELFKLTIGLGDLNIQQNSKYPILFLFLLITYVILTFVLLLNMLIALMGETVENVSKESERIWRLQRARTILEFEKMLPEWLRSRFRMGELCKVAEDDFRLCLRINEVKWTEWKTHVSFLNEDPGPVRRTDFNKIQDSSRNNSKTTLNAFEEVEEFPETSV

SEQ ID NO: 108 - DNA, 2376 bp, Mus musculus
  CDS (1)...(2373)
  ref <308>: DATABASE ACCESSION NUMBER: Genbank AAM33069
  ref <309>: DATABASE ENTRY DATE: 2002-06-18
atgaatgcccactccaaggagatggtgcccctcatgggcaaaagaaccacggcacctggcgggaaccctgttgtactgacagagaagaggccagcagatctcacccccaccaagaagagtgcacacttcttcctggagatagaaggatttgagcccaaccccacggtcaccaagacctctccacccatcttctccaagccgatggactccaacatccggcagtgcctctctggcaactgtgatgacatggactctccccagtctcctcaggatgatgtgacagagaccccatccaatcccaacagtccgagcgcaaacctggccaaggaagaacagaggcagaagaagaagcgactgaagaagcgcatcttcgcggctgtgtccgagggctgcgtggaggagctgcgggaactcctacaggatctgcaggacctctgcaggaggcgccgcggcctggatgtgcctgacttcctcatgcacaagctgacagcctcagacaccgggaagacctgcctgatgaaggctttgctcaacatcaatcccaacaccaaagagatcgtgcggattctgcttgccttcgctgaggagaacgacatcctggacaggttcatcaacgctgagtacacggaagaggcctatgaagggcagacagcgctgaacatcgccatcgagcggcgccagggagacatcacagcagtgcttatagcagcgggtgctgacgtcaatgctcacgccaagggggtcttcttcaaccccaaataccagcatgaaggcttctattttggcgagacacccctggctttggcagcgtgtactaaccagcctgagattgtgcagctgctgatggagaatgagcagacagacatcacttcccaggattcccggggaaacaacatcctgcacgcgctggtgacagtggctgaggacttcaagactcagaatgacttcgttaagcgcatgtatgacatgatcctgctgaggagtggcaactgggagctggagaccatgcgcaacaacgatgggctcacaccactgcagctggctgccaagatgggcaaggctgagatcctgaagtacatcctcagccgcgagatcaaggagaagcctctccggagcttgtccaggaagttcacggactgggcgtatgggcctgtgtcatcctcactctatgacctcaccaatgtagacacaacgacggataactctgtgctggaaatcatcgtctacaacaccaacattgataaccgacatgagatgctgaccctggagcctctgcatacgctgctacacacgaaatggaagaaatttgccaagtacatgttcttcttgtccttctgcttctatttcttctacaacatcaccctgacccttgtctcttactaccgtcctcgggaagatgaggatctcccacaccccttggccctgacacacaaaatgagttggcttcagctcctagggaggatgtttgtcctcatctgggccacatgcatctctgtgaaagaaggcattgccattttcctgctgagaccctccgatcttcagtccatcctgtcagatgcctggtttcactttgtcttttttgtccaagctgtacttgtgatactgtctgtattcttgtacttgtttgcctacaaagaatacctcgcctgcctcgtgctggccatggccctgggctgggcgaacatgctctactacacgagaggcttccagtctatgggcatgtacagcgtcatgatccagaaggtcattttgcatgatgtcctcaagttcttgtttgtttacatcctgttcttacttggatttggagtagcgctggcctcactgattgagaagtgctccaaggacaaaaaggactgcagttcctatggcagcttcagcgacgcggtgctggagctcttcaagctcaccataggcctgggcgacctgaacatccagcagaactccacctaccccatcctctttctcttcctactcatcacctatgtcatcctcaccttcgtcctcctcctcaacatgctcatcgccctgatgggggagacggtggagaacgtctccaaagaaagtgagcggatctggcgcttgcagagagccaggaccatcttggagtttgagaaaatgttaccagaatggctgagaagcagattccgcatgggcgagctgtgcaaagtagcagatgaggacttccggctgtgtctgcggatcaacgaggtgaagtggacggaatggaaaacacacgtgtccttccttaatgaagacccgggacccataagacggacagcagatttaaacaagattcaagattcttccaggagcaatagcaaaaccaccctctatgcgtttgatgaattagatgaattcccagaaacgtcggtgtag

SEQ ID NO: 109 - protein, 791 aa, Mus musculus
  ref <308>: DATABASE ACCESSION NUMBER: Genbank AAM33069
  ref <309>: DATABASE ENTRY DATE: 2002-06-18
MNAHSKEMVPLMGKRTTAPGGNPVVLTEKRPADLTPTKKSAHFFLEIEGFEPNPTVTKTSPPIFSKPMDSNIRQCLSGNCDDMDSPQSPQDDVTETPSNPNSPSANLAKEEQRQKKKRLKKRIFAAVSEGCVEELRELLQDLQDLCRRRRGLDVPDFLMHKLTASDTGKTCLMKALLNINPNTKEIVRILLAFAEENDILDRFINAEYTEEAYEGQTALNIAIERRQGDITAVLIAAGADVNAHAKGVFFNPKYQHEGFYFGETPLALAACTNQPEIVQLLMENEQTDITSQDSRGNNILHALVTVAEDFKTQNDFVKRMYDMILLRSGNWELETMRNNDGLTPLQLAAKMGKAEILKYILSREIKEKPLRSLSRKFTDWAYGPVSSSLYDLTNVDTTTDNSVLEIIVYNTNIDNRHEMLTLEPLHTLLHTKWKKFAKYMFFLSFCFYFFYNITLTLVSYYRPREDEDLPHPLALTHKMSWLQLLGRMFVLIWATCISVKEGIAIFLLRPSDLQSILSDAWFHFVFFVQAVLVILSVFLYLFAYKEYLACLVLAMALGWANMLYYTRGFQSMGMYSVMIQKVILHDVLKFLFVYILFLLGFGVALASLIEKCSKDKKDCSSYGSFSDAVLELFKLTIGLGDLNIQQNSTYPILFLFLLITYVILTFVLLLNMLIALMGETVENVSKESERIWRLQRARTILEFEKMLPEWLRSRFRMGELCKVADEDFRLCLRINEVKWTEWKTHVSFLNEDPGPIRRTADLNKIQDSSRSNSKTTLYAFDELDEFPETSV

SEQ ID NO: 110 - DNA, 3213 bp, Anopheles gambiae
  CDS (1)...(3213)
  ref <308>: DATABASE ACCESSION NUMBER: Genbank EAA06511
  ref <309>: DATABASE ENTRY DATE: 2002-06-20
cgcaaaaagcgcaaactaccgcagggaggcgccatcctcgaccaggtgatatcgcagtccgcgtccgcctcgaaccagtgtctcctgtacaagatggccaactacaagcggggcggcgatctgatcgacgcgttccagatcggcggccagaaggcggtggagcagctgatccgcgagcagttcggcgtgttcatgtacaacaagggccggggccagatcattaaccgggccgagtacctgcgctggaagtacatggacaaccatgaggtcatcataccgatcgaggcctccctgtcgccgcacgacccgctcagcaagtgggacgaccataaggcctgctggcagatgcagtaccggggcctgctgggcgaaagtctgctgcacgtgctcatcatctgcgacacgaaggtgcacaccaagctggcccgcatcctgctgcgcgtcttcccggagcagtcgatcgacgtgatggagggcgaggagtatcttggcgcgtccgccctccatctagccatcgcgtacagcaacaacgagctggtcggcgacctgatcgatgccggcgcggacgtgtcccagcgggcgaccgggcgcttctttctgccccgcgaccagcagggcctgcggccggccaagacgaccgactacgaggggctggcgtacctcggcgagtacccactggcctgggcggcctgctgcgcgaacgagtcggtgtacaacctgctgctcgagtgtggcgccgacccgaacgcccaggacagcttcggcaacatgatcctgcacatggtggtcgtgtgcgacaagctggacatgttcgggtacgccctgcgccacccgaagctgccgtgcaagaacggcatcgtgaatgcggccggcctgaccccgcttacgctcgcctgccggctcggccgcgacgaggtgttccgcgagatgttggagctttctgcgcgcgaattctggcggtacagtaacatcacctgctcgggctacccgctaaacgcgctggacacgctcatgccggacggcagcaccaactggaattcggccctgttcatcatcctgaacggcacaaaggaggagcatctgaacatgctggacggcggcatcgtcgagcggctgctggacgagaagtggaaaacgttcgcccggaaccagttcatcaagcggctgctcatcctcgcgatacacctgttctgtctgtcctgctcggtctacctgcgcccggtccgcgtgtttgctgatgacgagggcgaggagggcggagacgcaaccgatgacgatggtgcggacgatggtgggccgatggcggtggacgcggtcgacgacgacatcgacctgacgacctgggtgcggtacggcttcgaggtggccacggtgatgggcgtgctgagctacgtcgtactgcagcagggcgacgagatcaagaatcagggcttcttctcctttctcaagtcgctgagtcaagcaccggcgaaggcgatttttctgatatccaacatcctgatcctggcctgcataccgctgcgcatgatgggcgacaccgagacggaggaagccatcctgctgtttgccgtaccgggcagctggtttctgctaatgttctttgctggtgcgatcggactgaccggaccgttcgtgacgatgatcttctccatgattacgggcgacatgttcacgttcggcatcatctacatgatcgtgctgtttggcttttcgcaagcgttctacttcctctacaagggccacccgaacgcggaggacagcccgttcggcagctatttcggcacgtggatggcgctgttccagaccacgctcggcgactacgattacgccgatctgaacctcaccacctacccgaacctggcgaagacggtgtttgtcatctttatgatcttcgtgccgatcctgctgctgaacatgctgatcgcgatgatgggcaacacgtacgcgtacgtgatcgagcaggcggagaaggagggcatgaagcagtgggcgaagatagtggtcaatctcgagcgggcggtgacgcaggacgacgcgaagcgctacctggaggagtactcgatcgggctcgggccgtcggacgatccgcggtacgagacgcgcggcgtcatggtgatcaagagcaagagcaagacgcgggcccgccagcgcaagggcgcagtgagcaactggaagagcgtgctgcgcgtcacgctgaacgagctgaagaagcgcagcatgacgggcgaggagctgcgacgcatcatgtggggccgctcgtccatcacgtcgccggcgaagatcgcgaagaagaagcggccgggcgaggtggacgatctgctcggcgatccgttcgcgataacggccgcgatcgacgtgatgtcgttcacgcaggacatcgtgatggttagcacggacacggtctgcccgatcacgataccgccagcggctgccccgggcacggcggccccgaaggctggtggcaccaaaccggtagtagtggcaccgccgccgccagcagcagcaacagcagtacagcaaccaccgccgccagcgacgacgcggcgccactcgacggcaagcgcaccggccacgatggggctgggcgtggaggcggccctgcccggctacaaggatccgctgcgcgagctcctgaccctcttccagaacccgaaggacgtcgtggatccggtgcgggagcgcgagtttctcaaaacgctcgaagcgctcgaggacacggacagcgaggcgggcgagaagcccgtcctcggcaagatctcgctgatccggcgggccaaatcggccgtctcgcgcagcacgtcgcgcaagcgcaaaaccgaccagcacccgctgttcatgatcgcgtgggaggacaagggcgaccagcagcggcacagcacagcgctgtacgatggcgcgacgggtgcggccccgtcggtcggtgcgcccggcgagctggggcagccggagcagcccgaggacgccgtcacggtcgaggagctgcaccggcggatggagcagttccaccagcgggctggccacgggcgcaagcaggacaagcgcatgaagtcggccccgatactgggcagcggcggtgcgggcagtgccggtagcagtgccggcgggcggacggtggcgcccggtggtgcccgaccggacgatggtaccgggtcgccgccggacccgctcgaaccatggagcaccaagaacatcatgaacatcaacaagctgctg

SEQ ID NO: 111 - protein, 1071 aa, Anopheles gambiae
  ref <308>: DATABASE ACCESSION NUMBER: Genbank EAA06511
  ref <309>: DATABASE ENTRY DATE: 2002-06-20
RKKRKLPQGGAILDQVISQSASASNQCLLYKMANYKRGGDLIDAFQIGGQKAVEQLIREQFGVFMYNKGRGQIINRAEYLRWKYMDNHEVIIPIEASLSPHDPLSKWDDHKACWQMQYRGLLGESLLHVLIICDTKVHTKLARILLRVFPEQSIDVMEGEEYLGASALHLAIAYSNNELVGDLIDAGADVSQRATGRFFLPRDQQGLRPAKTTDYEGLAYLGEYPLAWAACCANESVYNLLLECGADPNAQDSFGNMILHMVVVCDKLDMFGYALRHPKLPCKNGIVNAAGLTPLTLACRLGRDEVFREMLELSAREFWRYSNITCSGYPLNALDTLMPDGSTNWNSALFIILNGTKEEHLNMLDGGIVERLLDEKWKTFARNQFIKRLLILAIHLFCLSCSVYLRPVRVFADDEGEEGGDATDDDGADDGGPMAVDAVDDDIDLTTWVRYGFEVATVMGVLSYVVLQQGDEIKNQGFFSFLKSLSQAPAKAIFLISNILILACIPLRMMGDTETEEAILLFAVPGSWFLLMFFAGAIGLTGPFVTMIFSMITGDMFTFGIIYMIVLFGFSQAFYFLYKGHPNAEDSPFGSYFGTWMALFQTTLGDYDYADLNLTTYPNLAKTVFVIFMIFVPILLLNMLIAMMGNTYAYVIEQAEKEGMKQWAKIVVNLERAVTQDDAKRYLEEYSIGLGPSDDPRYETRGVMVIKSKSKTRARQRKGAVSNWKSVLRVTLNELKKRSMTGEELRRIMWGRSSITSPAKIAKKKRPGEVDDLLGDPFAITAAIDVMSFTQDIVMVSTDTVCPITIPPAAAPGTAAPKAGGTKPVVVAPPPPAAATAVQQPPPPATTRRHSTASAPATMGLGVEAALPGYKDPLRELLTLFQNPKDVVDPVREREFLKTLEALEDTDSEAGEKPVLGKISLIRRAKSAVSRSTSRKRKTDQHPLFMIAWEDKGDQQRHSTALYDGATGAAPSVGAPGELGQPEQPEDAVTVEELHRRMEQFHQRAGHGRKQDKRMKSAPILGSGGAGSAGSSAGGRTVAPGGARPDDGTGSPPDPLEPWSTKNIMNINKLL

SEQ ID NO: 112 - DNA, 1908 bp, Anopheles gambiae
  CDS (1)...(1908)
  ref <308>: DATABASE ACCESSION NUMBER: Genbank EAA00229
  ref <309>: DATABASE ENTRY DATE: 2002-05-31
caggcgctgtacaagttcgtcaacctgaagggcggcggcctgctggtggacatgatgaagcgcgcgatacagaacaagcagtacgccgagattgatcatgcgatcaagacgaaggtggaaccgtttctgtacaacaagggcaaggggaagtacatccccgtgtcggtgctggtgctgttacgaaaccgggagcggccgcgccacaagcagctgcccgagatccgggcgatggagaacccggaggaggactttgacatcgatgcggtctgtccggaagtgagcgaagccgagtactacctaaacccgtccggctatcgggaggtgtgctggaacataaaggaacgtggcgctgtgggagagacaattctacacctttgcctactgaacgccacttccctgcatgcggatctagccaaacgactgctgcgcttctatcccaagctcatcaacgacgtgtacatgtgcgacgagtactacggtgagaatgtcctgcatctcgcaatcgtgaacgaagatcctgccatggtgaagtatctgctcgatcacaacgcggacgtaaacgagcgctgctgcggtacgttcatgtgcccggaagaccagaaagcctcccgctacgatacgcccgaaacggaggtcgtccagatggtgcaggtgacgaactacgacggctacgtgtactggggcgagtacccgctcacctttgccgcctgtctcgggcaggaggagtgctaccggctggtgctggcccgcggcgccgacccggacaacaaagacttcaacggcaacacggtgctgcacatgctggtgatatacgagaagattgccacgttcgacatggggtacgaggtgggttcgtcgcttagcatccgcaaccaccagaacctgacgccgctgacgctggcggccaagctcggccgggacgagcatctcgatctgctagacggggtgctgatcgatctgctcaagacgaagtggaacacgttcgtgaaggacaagttctatcggcagtttttcatgttcttctgctacttttgcgtgtcgctgagcaacggaagtagcgacgcgatgggtgagtttgatcctgccgagatggacgacgagggtctgttcttcaactccaactgtcacacgatggattacgacggtgtggagggcaaggtgcgtctcatatcggagatgatcatactggtcggttcgtttctgtatctgctcgctgccttgcgggagttgaagtttcttgggcggaaaatgttcttcgaaaatcttatgacagcaccatcgagggttatgtttctgttttcctgctgcataatgatgatcgtaccgtttctgaaggttctctgctttacggagctggaagatcacgtagccgtaacgatcatgctgacgacggcgccctattttttattcttctgtcgtggcttcaaaacggtcggaccgttcgtggtgatgatataccgcatggtgatgggcgatctgttgcggttcgtcgtcatctatctggtatttgtgatgggcttctcgcaggcgtactacattgtgtttttgtcctacaaaccggacgaggaaggcgacccaaacccgatgccgtcgccgatcgagtcgatcgtagcgatgtttctgatgtcgctgaccaactttggcgattactatggcgcactggagaacaccgaccacgagatgtgcgcaaagatcttgttcgtgctgttcatggtgatcgttgccgtgctgttggtgaacatgttgatcgctatgatgggcaacacgtaccagaagattgcagaaacgaagaacgagtggcagcgccagtgggcccgcatcgtgctcgtcgtcgagcgtggcgtcccaccaaaggagcggctcaagaacctgatgtcgtacagccaaccgatgtcggacgggcgtcgt

SEQ ID NO: 113 - protein, 636 aa, Anopheles gambiae
  ref <308>: DATABASE ACCESSION NUMBER: Genbank EAA00229
  ref <309>: DATABASE ENTRY DATE: 2002-05-31
QALYKFVNLKGGGLLVDMMKRAIQNKQYAEIDHAIKTKVEPFLYNKGKGKYIPVSVLVLLRNRERPRHKQLPEIRAMENPEEDFDIDAVCPEVSEAEYYLNPSGYREVCWNIKERGAVGETILHLCLLNATSLHADLAKRLLRFYPKLINDVYMCDEYYGENVLHLAIVNEDPAMVKYLLDHNADVNERCCGTFMCPEDQKASRYDTPETEVVQMVQVTNYDGYVYWGEYPLTFAACLGQEECYRLVLARGADPDNKDFNGNTVLHMLVIYEKIATFDMGYEVGSSLSIRNHQNLTPLTLAAKLGRDEHLDLLDGVLIDLLKTKWNTFVKDKFYRQFFMFFCYFCVSLSNGSSDAMGEFDPAEMDDEGLFFNSNCHTMDYDGVEGKVRLISEMIILVGSFLYLLAALRELKFLGRKMFFENLMTAPSRVMFLFSCCIMMIVPFLKVLCFTELEDHVAVTIMLTTAPYFLFFCRGFKTVGPFVVMIYRMVMGDLLRFVVIYLVFVMGFSQAYYIVFLSYKPDEEGDPNPMPSPIESIVAMFLMSLTNFGDYYGALENTDHEMCAKILFVLFMVIVAVLLVNMLIAMMGNTYQKIAETKNEWQRQWARIVLVVERGVPPKERLKNLMSYSQPMSDGRR

SEQ ID NO: 114 - protein, 6 aa, Unknown
  Ion transport protein motif
EWKFAR

SEQ ID NO: 115 - protein, 12 aa, Unknown
  Ion transport protein motif
  VARIANT 2, 7, 9, 10: Xaa = Any Amino Acid
  VARIANT 3: Xaa = Asp or Glu
  VARIANT 5: Xaa = Arg or Lys
EXXCXGXYXXYE
